United States Patent Application Publication US 2026/0275333 A1 - sequence listing, part 21

SEQ ID NO: 3045 - RNA, 64444167 nt, Homo sapiens (residues 42,962,781-45,110,919 of 64,444,167)
  source 1..64444167: mol_type = mRNA
aaccaggccaggcgcggtggctcacgcctgtactcccaacactttgggaggctaggtgggcggatcacttgaagtcaggagttcaagaccagcctggccaacatggtgaaacccagtctctactaaaaacagtacaagctgggcacggtggctcacacctgtaatcccagcactttgggaggctgaggcgggtggatcacgaggtcagaagatcgagaccatcctggctaacatggtgaaaccccgtctctattaaaaaatacaaaaaaattagccgggcatggtggcaggcacctgtagttccagctactcgggaggctgagcaggagaatggcgtgaacccgggaggtgaagcttgcagtgagcttagatcgcaccactgcgctccagcctgggtgacagagcaagactccgtctcaaaaaaaaataaaaataaaaataaaaacagtacaaaaattaaccagatgtggtagcaagcacctgtaattccagatactcgggagactgaggcaggataatcgcttgaacccaggaggcagtaagccgagatcgcaccactgcactccagcctgggcgacagacccagattctagatttggtctcaaaaaagaaataaataaatatataaaaataaaaataaaaaataaaaaaataaaaacaacctaaccaaatggggtcatttttaaaaaataaaaaatgagtagttacatttttaaaagttggtcgtgagtgcccaagcaaattaaatatgaaattttcttaaaaattgatgtatatacagttatagaaagaatataaatgctataaatagttctttgtaaaagatagagacataactttaaataataattattaaattagaaacacgaataaaaatcccatacttaccattaacaactgagaaaatgagtaaggcttatataagggtaggtcaaactatgctacccaccctaccctgcacaggggaaagccaataaaatactttgtattctgaagacaattaaaaataagttttaggaaaaattaaatttagatacatacttaaggcagctaaacgtatccaagagtaaaaccaaaagcagaatataatagaaaacctaatcacccaccacagaatcagcaagctctctaagggccaaacagcaaatagttcaggctttcgggctacatccagttattgctgctgcctgttctttgttttgttttgtaaccctttagaaatgtaaatccaccattcctaacctgtgtgctgtcaaaaacaggcagtaggttgccagcccctgcaacctactgcctgtagggagttagggaggaagtcaaatttaaaaacaagcataagaaatagaaagcattaagtgagataaaattcagacacaatatagttatcatattagtataaattgcctcaacttctctagcaaaagaaattgtctcacagactgagtcaaaaatcaagtgtatcgaaatattttccataagatgtgatcttaagcaattagattgccaagaggttaaattgaaagcatgggtggatttaataggaaaatgtcaatagaaaaaaaatgcagatgtaccaatatccatatcaaagtaaaattcaaagacaagtcattgaacaataccaaaaaagctattctacattgataaaaggtataattcacaaagaaatatatcaactatcatgaccttttctgtagcaggtagcaatgcattgagatatagaaaggaaactgttagaaacccagaaatcaacaaaatacagtaatagtttgagaatttaatacaactctctttaagtcctgacagatcaaaaaggaaaaatttaaataaggaagtcatgactaatataattagtaatattgatttaaagacatatatcaaacctctctccctacatggaattaattatttttcctgtgctttgagtattttttcggtgatgattaaaataacaataaggccacaaagaaccatcaccagataatttttaaatgtttttatgttgtattatctgaccatgaggctaaagtttgaacaaaacaaggatatttcagcattcataaatcaattaataggtttaatccaaagaggaacatattttaagttaaaaatcatatatcaatagatgccaaactgtatttgattagaatatccattcttgatttacattcttagtaaaatagttcaattattattttaaagtgattctctacctactaaatccaaggttatcaacagaaaaattattgtaatttataaacaagttcagtaagatacccagcataaaagtaaataagtaaactcactgctttttcatataaccccaccaacaaatttggaaagataacgccagggaagaagacatcctattccataaacacacacaaacccaaaatgctataaatactcatatataaacagaggtgtgattgcaaatgttcacaacaggtcctctgggaaagaaagcccggatttatagtatttgctgctctctgtggcttaaataatgccacgatgacctacttcaaaagaccaacatgttaccactgaaggcagatatacaataagatactattatacagtgtttccaacttacagatatacaatagacatgaataacctcaagagtgtagataataaaccgtagtaaaataattagggagtcatgagttttgaagataacctttgtttttacatatagtgtatatagttgtaggtttctataacttaagtttaagaatgcctgtgtttaacaaacacctcatggaaattctgaaaatttaatagctcttatgagcaggtaccaggctgattccagcatatcaccgtttaaaaaagtccccaataatcttaaccagaaagattcagtacttgcaaaaatattactgaacttaactgagagccataaaacttcaacaaatagaggcacacaaagctcacagatggaaaaacttaacatggcactgatgttgattttctttcaattcatctatacatttaagaaatcccaaacgatacccccatttaattttctttggggacagtggagaagggatcctgaaaaagcaatcctaaatttgatgcataaaaacaaacattcaaggaatagctaggaaaattctacaacaacagtaatattcaatgagcatttaatcttaaagacattacaaagctagaaggtgcagaaaagtgtgtcactaaacaccggagaagacagaagctatggtctcagtccagtggggtagaaaactacccagataggtcattctagttccacacggtaagaaccatgatggaatagccaagaggagttgggggaaatgagaagcttgggaataccagagaaaggaagtgacatctgaattgatttgccttttcgggtcgtttgaacctttcgtcaaattggcgtccagaaagcttgcacaatttaaaatcccacaccagtatatgaaactattttctaacatgcttgccaacactgggtattataccatttttattttatcttgcctagtagcttaccttaattagcatgcctgatgtttaacgaggctggtaatatttcataaacttatcggttatttctatgtctatttttgtagaaatccctctttcctctgtgttccctcagtccctcctgctctcttattatagatctcaatacactatgtcacacgagctgtcacagccgcttgcccatccatttcccccagagaccaaaagtcagaagcaggcctgtgtctgtttggtcgctgcatctgcaacagaaggtaccgcccaacttatagtagaaactctgagaacatacacccagtgaacaagacggtgggttttagaacatcttcacctgggtgtcaagagcaatcacatgtgaaccacatcaaaatggtgctgcttcccccgcaacagagttctgccaacattattaacggcagctgggcacaaacaaggaggaaaaacaaaaatagagcaaggctgtagttcattccattgtacgtgatcatcaggcagagaaaagttcgtaaaaatcaaggagaaatttcttcagaaaatacattttccttaagagattgtttcagtgtacctgcggaactgtcagagaaaattagattctccgcaaataacagtcacttgcatttctactttatttctaaagaattcctccactttaacttccatttgttgtgcttttacaacaacttctttaagagaggcatttggtctggtattatctactcatcagactttggaaaggcacctcgggaggtgatatgactctttagcagacgatgagtttattcaagtttgctgtgacatttgtgcaagagcccagcccttcctcttgtagctacttaaagacaccctgagaacaggaactgctccatccctttggtagctgcagtgggttgagtggtggcccccagaagataagtccatctcctaatctcttgaacgtgtgaatctgaccttatttggaaaacgggtcttagcagatgtaattaatttaaggtatttaatttaattatttaaggtattgagatgagatcatcctggtttaccaaggtgggccctaaatccagtaacgagtgtccttataaaaaacagaagaggaaaagacacagacacgtggaaaagaaggccagaccaggtggagatcaaggcagagagggcaatgatgcggccacaaagaacgctgacagccaccagaagttggaagagacaaggaactgattgtcccctagagcctccaaggaagtgcagccctgctgacaccttgatttcagactgtggaccccagaactgtgagagaacaaatttgtgttgttttaagccaccaaatggatggtaatttgttactacagccctacgaaccgaaaacagtgaccaaccccattcaccagccccctaatacctttgtggcatttgtattcccccacccccacatgctgcctccttccctcctaggctgttattcaaaccatcgcagcagcctcctcattgccctcgctgccttcagcctcgccctctccaagcccacccccgctaccagatgtcaggaagaaattccaaaactcaaaccaaaggctgatacgttcttgccctacacttcactcaatgctggcaacccaatgagggacatcaggataaaatcgagaatgcgcggtctgtgcttgtgaattcctaccacctggccccagctagcctcccatcccttatatctgccaagacaaattcccccaaatcccctctcccctggccagaagtgacctccacattcagccccgattatggaaggctgtcacaggctattccttttgctgggtaagcccttccccctttcaagtctatgttcaactgtcatatcctttttgaggacttcctttagctcttccctccacctctactgccacacttaacagagcggagttgtctcctctggcatcccattgtcgatagcccactcctgagttacagcaacaacggccacctgactccactcatctgttgacctgtccatttctccattagcctatgatctcctttagggcaagattcatccttatctgattcatctttgtatcccagatcttagccaggcaaacaacagggatccagtggagagagagatggataggtgggtaggtgaagacacagatgtacggttgaacacacaaactggcaaagttccaaatgaactaataagtggacacctcactgagagacttaaatgcagaagggtgccaggacataagaggaacggctgcgagttatgaaaatgggctccatggggcaaatcaaaagtccactgaaggcaaatgcatcataacaagactggcatttcctggagtttccgggctgatcaatcactttcatatgcatcattcatttactcctcacaatgacctggtgaggtaatgagttactattagctcaatgcacaaggaagctgaggcttgtggacatcagctgaagtctcacagccagcgaatggcaggccagggcaccagggcctaggtctgcctgcctcttccatccaccttctgtcatcacaagccttctgatctccagccctctgatctgccccagtgggaccctcctgcgtctctgctctagttgtagaggacccatcaggcacttagagagaaatgagtggtgttgtgaacattcgactgtgtccatgtggaatccacacacacagtttgcctgaaaatgactgataggatggaaactgacaagtcatcatccgcttcgggcaccagcgatgactggttaacatgaatattgtgttgatttccgctagatagaagaagatgtcacttgtcgttaatggggtgtcacacgtacacttgcctaaaggaaaatgctcttttggtgattgttctcaattttcacctcattttatagccataaaaaagaaaagattcagcagaaaggatgaatccacctaggggtaggatggaaaggcattcttctcatttatttccttctttctttaccagaacaaccaaaacccagtgaaaatgctggtgcaagtcagaagagggggacctgggttctaagagcagccaggtactctgggcttcagatcagagcctcagaatccagcagttatgcccacaaggtagccaaagtccagccagtaccaccggtctctcggccagctatacttgcctctgctcaacaatgatgatttgaacgtacatgtacaaataataacagataacattactgagcactttactatgaactatggaatgtgctaggtaaagacgttactccacgtaagccataaaatcaacctatggggcaggtgcagatccacaaaccctgatttaagaattctgaatcctcaaaagctttgaaaaccaaaacattttttcgtaagtttggtacagacttatttggtgctaagatttgagttaaagtgatatacattgactaatagttttttctatctccttcttactattaatattcatactttttgctacaaaaatatcaacatgcttgatttaagggtgctaccacagcctctgctgagggatgttattaataaatatggtacatttactatattgctttcctttaaaagttaaataaatctaaatccgagcacatttggccccaaggactgcagacaagaaattgagaacctgttaaacccattatatggatgaggaaacaggctcagaaaaggtaggaaactttcctgaggttacagagctcaaaagcagcagatgaaggtttacatctaggcagccttgctccagagctggcccggttaatcagtgggctttgctacctttgacaaatgcccctgctagctggtctcagccccatcctcccagcgcagcagttcagtccctgtttgttcttgagcaagaagtaagcatgtgccttcttagtcgaggtacaaggcaatccccagggtatccggatcataattacaatgctttattaatataaatctcaggatatagacctgtgtttcaaatcaagagtcaaacacaacaataacatcagtcttaggtaactaccagtcaaggattcggatccagacttgcgcttttacaatgagaagcaaacaaagacgactattaattggctgatggtcagccagtatcaaattatcacattttctcacactacagtggttatacagaccctggagctagacaggttgtgctgaaatcctgggtcagccacttaatagttatgcgaccttgacaagttgcataacctctctgtgcctcagttcccttatatagaacatgggggtaatgctagcacccccctcaccagtcgtcatgaggattaaatgagattgtatttaaagcatttggaatatagcaagtccaatcttagcctctgctcccagacagacagatgattaggatggataaatagatgctttgcttcacattttaacttctctgaaattggggctcttcttaccattgatgtgtacttataatgtttatattgttattctcagaaagctgcagcttaactaatggtgcttctttttctttattgcatcttagatacgtggtaatatggtaaaatactttggaggaactggatgtatttttcctctggtctccagagaagaaactgagacgacagcaagtcacagattcaagctgtgttcataatgtgtttccacgtggaggtcacactttcatgttcatgggcagatgaattctaacaccaaacaccaggctgaataggtgttcccattgcaagagaagtgctgtgcacaatttttatttgcatttcaaaaccctaacaaatggccacaatcaactactacaaatttctcctaattagttttagtctgcacttctgtcacctttaggagagagccaaagattttaaccttcaaaattatcagcaatgcatgtcagaaagcatttcaaagaagagtcaaagtgcatgtagaaactaattgctgtatctgaaagtgctgtttgaagaatttttcagtcttcagagaagcaagttccccaccccttgggaaaactagtcttcaaactaaaagtttccccaaatcatatacctgagaaaaatgttaaaacagacttacccaaaaaggcaaagaaataaaactgtaagaataaataaatcagaaatcagatgtctctcccctgtttaaaatcctccaacagcttcctactttacttggaataaaacgcaattcctttaccatcaccttccaggcctcatgtggtctgtcccccacccatttcttccatttttttttcattctgtgttccccttcacaaactgctccaaacataccagtctttgttgttgtttgcttcaaacacatcaagtatattctcgcttcaactactttgctcttggtattcctccttcctagaaagattccctaaatattccccaactcccctacccacggataccaggctccgttgcacaggatcgccaacacacaaggtgacttagacccgaggtaactttttctgattcacacaaaagaaccatatgggctagagcagtcctgcttacctacaatgattcattcatttctagaacaaatgttaattgagcacctactatgaggtaagcactgttctgggcactggaattatagccttgaacagacagacaaggcctttgccttttggaagctcacatactagtaggctgaggcacacaatggatgacaatttaacaataagcgaataagcaaaatatcagaaagtagccagagtgcacagacaacctgacgtggttatatgacagtgactgaatggtaggtagtcaaagaaggcctcctagaggtggtgatacttgtcgtgaaatctaaatggcaacaaggaatcatcatggaatgccatgcctcccctccccaaccccatttgtttgtttggggaggggaggcacggcattccatgcagaggaaacccaaggtgtgaactttcacaaaggccccaagtagtgcacaatcaatttgttttagaaacaagaagttggaaagtaatggctagagaagagaaagtcaaagataaggccagacaggtgggaaggagccaggtgatgtggggctctacaagtcagaataaagaatttgaagctgggtgtggtggctcatgcctgtaatgccaacacttagggaggccgaggtgagcagataacttgaggtaaggagttcgagacctgcctggccaacatgatgaaaccccgtctctaccaaaaatacaaaaattagctgcttgtgatggtgcacacctgtagatcccagctactcaggaggctgaggcatgagaatcacttgaacccagcaggcggaggttgcagtgagttgagatcacggatcgtgtccctgcactccagcctgggcaacagaatgagactccgtctcaaaaagcaaaaaaaaaaaaaaaaaaaaaaggaagaagaagaatttgagctttattctaaagtgagctatgaaaatatttgaggttttaagcagggaggtccatgagctggcgtctattttggaaagatcactctaactcagggttgtcaaaaataactttctgcaatgaagtcctatatccacattgtcaggtgcagtagccactagccatgtgtggctactgagtacctaaaatttgactggtgtgacccagaaactggatatttaattttattctattttaattaattttcatttaaatattcacatgtggctggtggctactctattgatcagcacacctgaacagctgcatgaagaatacatgaagggtgtggggaaagatgagagtacaagcaggaagattaatcaggaggctaccacagtggtccaggggagagatggtagctgcaagcagagatggagagaagaatacctttcagggtggagccaagagtgtgagagggagaaaggaagaatgaggaatcgtggataccacctagatttgtggtttcagaaccaaatggatggtggtgccattttgatctgggaaagactgaggaagtagtacgttttggggaggaaaaaaaaccttgaaaataaccagctcctccccaagtcttcatgtggcagcttccctcttaacttttggacctaaaatgtcagctcaaatgtcacctccccagaggaactgttgcaatctccaccccacttctttatcccatcctctctctctctctgtgtgtgtttgtgtgtgtgtgtgtgcatcatattgctccattgttctcctccctgtagattatctgcaattatttaatcacgaatgcattgcctctctcttctccaaactgtaaactctctgtgcagcgacctcagccccttttcccacagtggtcccacctacctggaacagtatctggcacatagcaggtacttaaatatgaattattaaacaaacaggaataattatcttgccaaacaaaacacggctaaagcctcaaagagtatgtttctggtttgaatttcagacaacataaaatagaagaagacaaagtatgctcacacacctgctcaaataattgttgggatataactgggaaataattaattgggatacattttgtttggggttattttaccagtactccatttattcagaaaactgagtatagtttccaggtaatgagccacctcatctgacagatgcagaagagagatgctaatcaggacggtgattcctagcactacagtcccatttctctcccagagtatttggggagacagctgagagtgtgtagaatgaaagcagggtaatcccaggctgccatttttgaaagttcagagtgtccttaagagccacttgcccttagttaagcacaccaccatcacccacccatatcccgccaaccagcagcagatgctaccccagctgaacaggtgtacgtggctcaatgcaatgagaagggactttgcaattaaacagataataatttgaattcagttttaaggtcttgagaaaattgcatagcttctctgatcaccattccccatctgaactccccaacaaccaaaacctctagatattttcttgccaactacagctaagccacatcacccccaaatttttaagccccagagtacatctttgcatttacttgcttcagcaagttaagcaggagtttcactcaactttgtcattatttttcccactctcctctccaacttcattctctctgtaaacgcatcatacctcagtgcacgcgcgcacacacacacacacacataatcatacaattccacacccacagacacacacagagcttctctgcagcttctttcactctacactgactcacagtcgtgagaacacatttccttttcctcttcacaggctcctgaaatgagatcatatctgctaaaagcaatcgcaagtgctgggtgaacaactccagaaaattagtacaagttccactacggctagagacagagaagaggaaaaatctgttcaattttgactgtattcgcattacccacaaaaggaaacatacttcttatttcttccacttatcccaatccttaacaaaaattaaaacaaaagctataagctatttccagcactacccccaatggtcatttttaatttgtcatcagcattcgttccaaatcagaaatgtaccagtcacttcactttttgagtatgatttctcatcagtgctgctgcatcatctctatttccaaggaagctaaagacaacataacgttttaaaaaataactagaatgcattatagatttaaccatgagtcatcacagacattgaataaaagtataactctgcctccgtgagcctgacatatagacattctgaacaaggaaataatctgtggaatatctgatatagacacaaaggacaagagattaaaaaaaatcagatgtgaaaaaaatgttgttttccattgctttgaaaataattgaaatgaaaaactatctaatatccactcaatggaatatcatgcagccactcaaagctatttttacaaagagtttttaataacatgagagaagtgcatatgctatggttacatggaaaaaaaggcaagacacatgataatatttacagcatgatttcaattatatgaaaatgcaccaacaaccctaaaaggaaacacaaaaaaataccaccgatgattatctttgggtagtcaaaaaaatgtatggattcttatttttgtaatccattttcctatattttccagactttatggataggtacttttttatataaaaacctttcatttggcaaatttttattttaaaaaatcatctaaactttgtaaacttcttttattttgtgaaaatattttctgcaaaagcttctgtcttaaactgccttcatagtattgtgacgatgcttgaggaaacaagacagaattctcactacgcctatacccactaccaatttccaagcgggggcagctaaggttccagccaacactacttttctggaggctatagatgggtgggaaatctggcagtctagccgttacgtagaaatcccaaggcaatcagcaaagaaggctaaaacattaaaaccaccatggcacacgtatgcctatgtaacaaacctgcatgttctgcacatgtatgccccgttttggggaagaaataaaaattaaattaaaaattaaaaaaaactatcagtccaacttacccccccaccaaaaaaaaaaaagagagaacatcttagatagggtcatgaagcactcgatcttctcacatgcattctctcctcctttacacatgaaatccctgcaaggccagcgttatcatgcccatttgacagataagaaaatgaatgtatacagagaggaggaaccttgctcaaggtcacaaatcagtctcctgtcaacatctggaagcaaatccatgtctgtgatgctaatgatcaggatctttgcattataccatatggcagctttcatctggactacaataattgagaaaactgtatcagatacagggagccctgcatatcatcatcatcaggaaagacctgcactgggcctcctgccaaaggatacctaactgtataagtttaatgaatacaggcaaccaaattcccaccttatcccttaaaatcctagaaagaacacagagttgaaattaattgtatttaaagtatagtatgcattttttatttatttttttttttttattgagacagagtctcgctctgtcgcccaggctcaagtgcagtggtgcaatctcggcttagtgcaacctccgcctcctgggttcaagcaattcttccacctcagcctcccaagtagctgggattataggcacccaccaccacacctggctgatttttttcatttttagcagagacaggatttccccatgttggccaggctagtctcaaactcctgacctcaagtgatctgcctgccttggcctccccaagtgctgggattacaggcgtgagccaccacactcaggctgtttattattatggaatactatatcctaaacatgggattactacatcaaaatacaggaagatgcttaaaggctcttgatatttcttttcaaattttcctaataaaagtttatgtgagtttatatgtccataaacatggtatacaaataaccatttagttacatctttgccacctctgggaactgcaattttagaaaactgtcaaactgacaaaacaaagagggaagaaatggaagacttcctatgtcagcttttgaagaggtcatgtatgacataatctgaatatcccattcaaatttttaaccacagcactgccgaagccagccagccagcctgacttagccctcttatgggaaaatgtagcaagtggttctgtggttaaaacaagcacagactcataggagaattcaaaaaccaatgaagaccctgggttccaaatccaaaatgccagacagatgaaaggagagaatggaggatctagcattatatttactgatggtctatttggtaccacattctttcctatgttctaaattagcccttagaataatcttgtgaagacctacatttgctcccattttatagacaaaaagagtcaagattcaaaaacgtcaacaagggcacccagctagtaaatgcaaagctcaaatttaaactcagactcttccacccaaaactttttgattctttacccttatgttttggttttaatattttattttcatatcacttattacactttccaattttaaaagaaatacttgtttattataataaatatgtaaagtagtttggaagattctctaaagaaaaaaatcaagaattgttcataatctaccacccagagacaagaactgttaatactttgtttcattttcttccatttatttatgtttacatataatttaaataaaatcagtactagattgtatataaaggctagtttgctaatttttaaactaaatagagtgtgacttttgacagggcatttagtattacttgtaattatcattttttacatctgcagataattatatcaaatgaaagccacataattattttagctactctctattgctgaacatttaaaattgttttcctcagttttctatctcaatcttgtgataaaatccttttatattaccttttatgtgcatctctaattgtttccctaaactaataaattcgtgggaatggaattataatagtcctcccttatccacaggaactatgttccaagatctccagtggatgcctggtgcattggatagtacccaaccttatacatactacattttgtcctaaacaagatctccagtggatgcctggtgcattggatagtacccaaccttatacatactacgttttgtcctaaacaagatctccagtggatgcctggtgcattggatagtacccaaccttatacatactacgttttgtcctgaacatacatattaatatctatgttaaagtttaacttataaattagacacagtaagagattaataactaataataaagtagaataattataatgatattctgtaatcaaagtatgtgaatgtgatctttctctttatctctctttctcaaagtatcttattgttctgtacccacctattttcagaccacaggtgaattcgggtaactgaaaccacagaaagcaaaactgagaaaagtgagagaatacagggtcaaagagtatgcacattttaaggttctaaaactatatactaaactgctctccagaaagattgcaagaatttatatcctctagatgaacatatcactttatcaccaccaatactgtcagaggcatttgatccagagcaactccatcttgagcagtggctgggtaaaatgaggctgagacctactggcctgcattcccagacggttaaggcagtctaagttacaggatgagataggaggtcggcacaagatacaggtcataaagaccatcctgataaaacaggttgcagtaaagaagcccgctaaatcccaccaaaacaaagatggccacgagagtgacctctggtcatcctcactgctacactcccgccagcgccatgacagtttacgaatgccatggcaacgtcaggaagttaccctatatggtctaaaaggggaaggcattaataatctatcccttgttcagcatatcatcaagaaataaccataaaaacgagcaaccagcagcccttcggctgctctgtctatggagtagccgttcttttgttacctcagtttcctaacagacttgctttctctttactctaggaactcaccctgaattctttcttgcacgagatcaaagaaccctctcttggagtctggaccaggacccctttcctgaaataacactattgtttaaattgttgtcaacgtaaatcgagaaaaaatggtacctttattctttttaaatttatatttcagcaactaaaaggaaagctaattttttttcagatttttattgactatggcaatttttcttacatgagttgtaagaaaaacaactcatttttctgtcaagacacctttttgttgcttattagtgttctttatatatcaaggatagttagccattgtgaatcatatttgctgtaaatatttccctcaagttgttctttaccttttttgtaattgtatttttacttacaaatgtttatgaattttacacaactaactccattatcctttctcatcatttgtttcttggtttttacacttggaaagcccttgctccccgtaaaatcaaatacacattcacctatatttttgtagactttgttctttctactgcacgctgtgctgattcttatttcagacgggtgaaatgtcaaacaactgaaatatccttaaggtttgaaaaaaaaaggagaagtaaatctatctgagaggacacattcactggcagataaattatggatgatcctgccccctttgtaatctcagggatgacaactccagtgtgcaccaaaaacccttagaaaaattctaaatccccttatcctaggtctccagtctgggccttatgggaaccctaaagctgtgattctccccagggagtataaaactttggtctaaaggtgaataactgtagagtcaggtaggttttgtcccaaaatctcaaatcacccaggtattcccagaacgtctatcctgtgtccagccccaaatctcagccagagaacccagggagcacacaggcatgcctggagggggtctttttgagattccagaagccggagagcatgcaagtatgccggccgggaagggggggtgggggggggtcttcctgagagaaagcaattaaaattcacatcacaaaaggaatgaggctttttttattctaaactgcaaaacgtggtgtggttaatcagagcaattataaatggtaacatcattattcaagcttctatttccaaacgaagtcatttaaatgaatacattttctgccttggagcagtagctgccagtgagcctttaaaaagaaaagaaaggagaaaaagaaaaaagagaaaaccggatgaagccgctggtgcaaaaccttggaaaatagggtagaaagaactcagcattgggaattgggagcctggggtacaaacatagatccaacacggtctcattctgtaaccttgggcaagacttcagttcccacctgtgcaacggggaaatagatgaacttgtattcgtgaccccttcttgctctgacattgtgaatctagattttaaccactaaaggtctaatttttctacatgctgcagctgcaattttatagaattcatcaatgtgttaaatacattctcttattcaaattcgaagacaaattcttcagaaactgcctaagctgtctctaaatggtgacagacttccccccaccctactgcagcctgtattgtgtgtggtcttgaaggaaggagcacgtgagtgttgaaatcagatggtcctgggggtcaaatctcagctctgaccaagaaagccttgacattccttccccttggtttgactaaagttttagacaggtttcttcctgataagctcctcacctcccttttgttagagcgtctactttagaaaacttgtaactacaaattctttctctgctcctttaaaaaaattctgctggtcatttactagttttacaacccaagtaatgtctttctcaaggacctgggaagcaaccatttgaaatgtgagcattgaaggagagagcgtccctatctcccagtctgcggaagagtgggagcccaacttcagtgtgcctttctccaactttttaacctctcctatcatgaagatatgagaaagtttacttttcctttagtaaacttaagtagcaaacacagatggcctgagaattccagctcttaagaattcctcgtccctttgtttcaggagagttaagtcctgtctcgacctgattacaatggtcttgaataatatcttccttgcctgattaaatttgtcaggtgcaatttttacttaggcagttccaactgtgtaaatgtacctccttcaacttccttgaacttcagggtccctatccatgaaaagcaaacaacagaaaaagtccttcttttaaggagtgaatggtatatttcagggaataaatcagaacatgcatgtaatcacctgcacagagaaggtgggagattgtttgcaatatctacttccctgtaaccacacccttgggttatcccttcccacactgactgtggccctggccacgtgagttgctttggccaataaggcatcaacaaacatgctgcaagcagaggcttgaagaagtacttgcgcattgggcttgccctcttgttgcacttggaagcctgagagcatcacagggatgaacctgacctagcctgctggatgggaacccacatggaggagaaccaaggtgctccagagggcagcctgctgaactccagagatgtgagcagggcacttgagacacatgagagaacccagcagaaactaaacaagctggccagagaagaataaccacctactggacacgcatgattgtacacaaaataaaacggctattgtataagccactaagttgtgagatcatttgttacacagcaaaaactgacactatcaggcactgcatttatgttcatttcctttttcccttttctaatggatggctttgggtgttggctaggaaggctgagcactagcaaaacagtcaccaacccaatcagaaatggcaatggtctctttatggggcgctcttttcagctccttccagctccagaggccacaactagaccgagggaagaagacataggtgggaagatcccaataagtccctaaactcatctgaaaagatatgtgggtttcctaacaaactcatatagcatcaccaatatgtgggtttcctgattttggctcaggcacccttgggaaagtttcacgcattcctggaagtactgaaagaccttcgttaggttgacgaagaggtgtcatccatgagtttctgcctacacttaccaccaaattttcaaacgtactcagcatcattatgctgccggcacggggctgggtggtggagagagagagagccatgactaagaagccatccatctgtcctcacagagctcactgtgcatgtgggaggtagaccttaatagagtaaacaaacaagtaacataattatatcatgtgataaagattatgcaagaaatacacacagagcttggcagagcgtgactgagcacgggaccatgaacacccactcagcaaggagggaagggaaggcctctctgaggaggtgagatgtgaaataagatctaagcgtataaaaaaagccaaccattaggaaaaagaaaaatctgccaaagagaactatgtgaaggccctgaggcagcaaggagcttctagaagtcagaaggtgaccagtgtagatggatcgaaaggggaggagcgatgggagatgaggccatggaggtgagcagggccagctccgtccactcggcttccccagccaaggacctggttgcctcccaggtccttgatgagcagcctccatccctctgctcctctcccacacccgccctcctgaggttcagctccagggtgccattgctgctcttatgacacggagagcagaggttgaggatctgatgactgcaggcacaattcctctgtgccaggcactgcgtgaactttctgcccaacttcttataatctatccaggtagatataatcactacctcccacataccttacgggcattagacgatcttcccaaggtcacacggccagccggggtcagcaagcagctgccagtgctgggatttgggcagcaacctgtctacacaggctcagactccaggctggctccggtggctcctttggtgttatagtcacttccccactgggtgctttgtctcttctgctcttgttatttcaagctctcccatcctttgtgtgcacatcctttgtgtgtctcttcagggagccccaaaagagacccttaaacatctcctcttacatttcactaggttaaatttaggccactttgtagcctgtcacagccatgctgagtgctaaaatgccctacaactccaaggttggaaataacaatgaaaatgagttgagaagggagacccagtgttggctgagtgatttttctctgccagtcacagagctaagcactctacatcctcctgctgtttaatcccttaatcaaccccaggaagctgagcaacttcccaaggtcacagagacaccaaggcagagccacagtgggagtccaggcaccaccagggtgttctgcctcccaagtgaagtccccctggatgccatatccactatcagagggacatctccaagctgggcacatgacaccagcacagaaggtgtcttgcaggtcctgggctcctcctgggatctggggatgcccacttcacactcctgagacaagtgtagtccacagggaggtgtggccagaggccctgcccacaacccactagaaatgagagatggtttcacacaccttggaggtactgcccagagcttccccttccacttccaccccactgtcgtgtttctttccagtttcctgccttacttctggcaacctaatgttttgtgtataggccttattccattttccctgtttaacataggttgtatttccctgggcacgctggccccatctccatctcccatgggtcccaatttgcccttctccaccaccaacacacattcttccaatcagacaactccactttggtctcagctccccagcctggagctgactggtcaggtctaccatgcccatttgagttttatctgcaggataccaccatgttcgctcacaatcacatgcatgcaaatatggacaggtacactcagctgcaccaaaacatacaagttaataggcatgcatttatccacatgtgcacaagcacacagctccccatatataagcaggtatgttcatatatgaatgcacatgtatgtacaaacatgagtgtatatgcaggctcacagacacatacatacatgcacccttcctcaattcacaaagaagtaactaatcaaatgccacaagtcattcacaagccacgagaagactggaattgacagaccatataaagagacagacagaaaaagtcctgaacatgccagttaaaaaggctctgctattgtctatcacacagaagcttgtaaaaagaccacattatttctgacacaaatacagctctccactttctgtagaaggattccaataaagataagagctttctcattattctaatgtggaacaaaaacaatctcccctttccaaatcagcacacagaagtaaagtctccttagttaactctgcagctccctaccccatgatgctcagctcactccaccatcatgcagcaaattttcttgagcacctactatgggctgtcatgcaagttttattatttagttctcacaataacttccaaggtaggaatcattgcttttatttttacagaaaagtaaataggctcagagaagttctttaacttaaccaagtcatataggtagtagaagaagagcctaggcttgtctgacaccaaagtccattctccttgtatgatgccagtcataagaacaaagagttcaagaaagactcaagacctaggaatcagcaacagttaaaggaatgaatgcatagcatgtggtaagcagagccagtaagtgctaacgacagaggctgaccaggtggcttaggaagttttaggtggcctaaagggtgaatgtactggtagaagacagtggggtaagacagcaggcaattcaggaagaaggaatgaggaataaccagacatgaagattgagtgaatatgacccaactgggagctacagcaggagggatcttgaaagaacggaatggaagttgcaatgggggtcaggactttgaagagcaggttcaagagcctggatgccattacttcaacatttttacgactcagcaactccatgccaggccctgtactagaaagtgggaataccgccgggtgtggtggctcacacctgtaatcccagcgctttgggaggccgaggtgggtggatcatgaggtcaggagttcgagaccagcctgaccaacatggtgaaaccccgtctctactaaaaatacaaaaattagctgggtctggtggctcgtgcctgtaatcccagctactcgggaggctgagacaggagaatcacttgaacccaggaggcagaggttgcaggagccaagatcacaccattgcactccagcctgggcaacagagtgagactccgttgctaaataaataaataaataaagtggggatacagtggccaacagaacagaacagaacccaacagaaccaagacccctgctcttgtagagcttactctcttgtgggggtaggggtgggaaacagatcaaaaacaatgcacttttttaaaaatacagactttttaaaattatatagaatgaaggtggtaaatactacagagaagaaaacctaaaagtagatcagaggtaaaggggaggggccataattgtaaatagaatggtcagactcagcctcactgagaagatgttcaaagtctagcggggggatgaggagtgcgccccccagagccaggggaaggttgatgcaggtatcaacagcagccaaggtgaaggtacgcctccctgttcaaggagcagcccagcagtgtggccagcaaggctggagccagatgaatgagggtaagagaagcagaacacaaggtctacatttatgaccgtgaaccacaggagcctcaaaaggcaagacaacagggacataaaattagtacaatggtgtagtgagtccaagttaccgcggatcatttcattcatctctatcgatcattcattccatgaacagagcagcaggaaaaaaaggatcttaatatgatattcaactaatccttgacattaatatgaagctctgacactatgccaacgaatatgtcattgtacacacactaccttcctaaggccacaggaaatgggagcggcctcaagccagattttcttctgtaccagaatcattttcaagagcgattaggtgggagggcacagaccctgaggtgttcccagcccctctgtgactcactgaggtgttcccagtgtctccaaagcaaaccagcttcctgcagcctccacctgtccattttaggacgaccagcgtttgatgaaaatagacctaagcattctggcatcttcctccacctggactcatcctgagtcacccactcccctctgcagcatcctgtggaatccaactccagcattccccttagtacagctcgagagacagtttctgaatggagctttgtctagccctaagggtcatatgaggtcagatgaggccagcaaacagaactagagattcctagctcatggacgatgatggtgactgtgacaaagaaagcgacagtagatagtcatccattcttccatgcgtcactcactgtgggaaggagtttacatggatttatctcatttgaggctcatgaaactcctacaaggtagatagtatttatatcctatctgcagatgaagaaactaaagcataaacagtaagcagcctccacacccgactgtgaagacaccgaaccacacccagccctagaaagagagctgtacagtgggggcttctgtgaacaccagaggctggggacagactctcctctgggagaggactaacccatccatcctttgcagttgctgtcttagaggccacatccctgcatcaggctagaccaggtagaaacaaacacacactgactcccgcttcagcggttccaatcctcatatggtactggggctgtaggaaggcacaagaggccacagaactcaggacagttggtgggcagccatcatctccacctagacccccacatccacccctccctgcctccctctgttgtttccacccatcctcgcccctgcaaccagcactgcctccctacaaactcctctgaggtgataccactgccctgccaggagcttctcccccagctgcccttgcactttctacactgccctagagggtgcctactggccacatgaggctacttgaatttaaattgactgacattaaataaaatgtcaaattcagttcctcagtcgcacgagccacatttcaagtgcacaatagccaccaatggttggtggctatggtggtcggcagtgcagatacagaatactgccctcaaggcagaaagtcctgtctgcagctctggcttagctgacaaaatcccaacccctcatggggcctgccagacctgcatggtctcaccttgcttgcttcccagcctcttctggtggacacttggtcatgctgtcacactccagccacccaccctgtcttcagttcctcaaacataccaaatgtcagccacctcagacactcaccccgcccacactccgcccacccctcccccacagtttcctcggctaaagcccccattctatcaggagtcactgcaaactttgcttcctccaagccatcatccctgacacccccacaccaaaattcacccatacagataaacaatagttgcagtaattatcataacctctcactgcctgtctctcctttcatggcacttatgaaacgtgtaacatcttaaggccacagtcacccgaaagcttgacgggagctggggatcctcctccatgctcacacatgtggctgctggctggaggtcacgtgggcctcttcacaggacagcttgccattgcttccctctgagcaagggatcccacagacaggccgagatggaagctgtagtagctcttattacaatcgaatcttggaagtgacaaatcaaagcttctgccaaagtccactgatcacacacatcagccctggaacaacatgggagggattctacaaggaggcaaggattttgtgccccatcttggagacgggccactgaaggctgtgtgtcctgtttatcactgtgtccccagagtgttgaaaatagaataagtgctctgtcaatgttaccaaaacaaagaatggcagccttctcatcagaggggcctcactttccttgtctacaaaacctaggagtcaggcgtgaaaatatttaatgttcttccccattcgaaaagtcctctggtccatgttgactatgcagtccgtgcttgtcttgcccttagttgaagtggtgacatttaagtgaacagctgtggatctgtgctccacgggtctgctctctcagggacagggtcatgggatgggggagatgtaccaggcttccctccctctgacttgggtctagtccaggcttcccatcccccatgtgctgcaagcagctcggtcatacaacacatggcaactgacaggttcatgacggccaatgaaattatatgcaccatacagcagggaaacacactcacacaggaccagcagagccactgactttttattagatgcttctcccaggcaataaaccaggagagacagtggctgcagggaaataggaacccctggtcagaacctgtgactgggtcagtcatttgcagcagagatgaacattgagtcttggcctcaggggtaaagagtcaaccggagggacatgctaggaatgagggcaaccattcgacgaggtgacagtgtgccttgtgacctgcaactgccaacacccatgagcatcacaatgatggaatagtaatagctaccttgcaagaagcacctgctacatctaagacacttcacatgctttatccctaatgcttgcatcatcttctagacactaagcccatgtttatcctttatcataaggtctcaggataacatcacacagcatatgacagagagtaagcactcaataaccattgtgtgaatgaattagtaaatgaatgggcaaatgccatcagattggcattattatgcccattttatggaatagaaaacttaggtttatctctttgctccaagttatgtgggtggtactgagtaaagggctgggtttgaactctcaactccctgattccaagtctgagacccttttcacattacaccaaatccttaaatattttgcacatgggtgcaagcacaattagtaaaattctaccaatttccatgggatagcacagttcttcatgaaaacacagagatcaggaaatatttgtgtgagcagtgagagatgacaaaatgtagcactgccgtggtttgggagaacccgggagtatcactttagcagttagccagtgtacaaggcataccttggcccatgtggctggtgcccttcctgggtcacagcaagtgagcactgggctttcccagtgaggctgacaaggactgcccaggtagaaccaggggaacaggaaatgtgtcaccctagaaacgagtattggtttattattatacaaaactccactggctcccacaaatcaactcaggtaccacaaggatgttccatcaatgttttcattcccaaacacttgattccatttccccagccactccctcctccctcccttgacagcagaagagtctacagactgctgtattttctgatttgctttcatgcttcatttaccttacttaagtatgatttcaactgggaaaattgatgattataagctggaattttgagatgtaaacttgaaatcactgagaatgtgaaaggcaatgagcacagaaaaacctccagtcacagaaggtcacaccacagtcacatccccttgggcttctcccaataacaccacagcccttgtggagatgttgaatgaagactgagcagcattcaccaatgagtaggatgcacataggtgctttgtttcttataggcttgtcattattgattattgtagaaacaaacaaaaaaatgtgcctaagtatcatgacacgcacaaaacatctatcatcttacgaagccgtcaccgtttcaaagagatattaaaaaacatatgcacttttaaaagacattttaaagtctatgggaaaagaaggcatgatggtgaacaacttagaacaggggtcagaaaactatggttggctgcttattctaaataaagttttattgggaaaaaatctattggaaaaatatttcctagctggctttctagagaaacggttgccaacctctgatttagatactgcattgaggatttgttcagcttttttttaatgttggtatttatgaagatgttaagttaataagtgactgataataaaatcatctggtgcatgggatttagggttgttttgtttcgaagggagaaaaaaatgtttttaatgtataaacttacacactaatgggcccacatcaagaatgggtaaaacttcagagagccatagtgtatatcaaggccaccatacaccctacgacctaggtttacctctgtatctctcactgacactctcaccaaaaaagtgtgttcaacacaatagtgaagatgatatgtcttggaaaaaataaagcaaaatggtcacctcaattatatttttaaacaaactcactgtaaaatgagaagtgactttgaaaatgtaggtactgtcatggtttcagaactctaagtcaaaatcttatttttctttatgaagggaataaaatggtgacacaaagaaaggtcaaaatctaaataagaactaattcattactcaccttaatgaaaaggggagtttgcagagttagataatttagcagatattgtttcataactgaaaacattcttatgtgaagtggacagtattgatcagaaagagtttttgttatacaaaaaggaaagaggtaaagatgacctggtaggaataaagggtattatattagaaaatttagggggtgaaaggaaagctttacaggtcatttcgaccttgtggagagaagcaaacccaggagagaaagcgggcggaactctgaaatggtttgcattcttttaactacaaaaatgagggaagctgaaaacagtaagaatttgaccaggctgagttaagggttgtagttacatttatcgtgtaaaaatgcaccctcaagggactggacctgaggctcctttcccatgctaatgaaataatcatagaggccagccacctccagtcttgttctgaagtctgaaaagtttttctgcaaggcactaggatagtaagtatttttgggtccacaatacatacattatctatcacaactgctcacctctgctgttgtggggcaaaagcagacacacataatacataaatgaatgaacatagctgtgctccaaaagaaaaaaaaaaagaaacgtatttatataaataagctatctgaaatactgtatgattccacttccatgagttacccaaaacaggcaaatccacagagacagaaagtagagtggtggtttccagggactggtggggggcagatggaaatgggaagttactgtttaatgaacacagctttttgggggatgatgaaaaagttctagaaatggataggaatgatggttgcacaacacctgaatctacttaatgccactcaattgtacacttaaaaatggtcaaaatggtaagttttatgttatgtctattttaccacaataaacaaattaaatatatattttaagataaacacataatataagcatatctgattccttgttgcaaatatttgtctcacccttggggtccaagtgataactgggtggaaagtcccacgggataaatttaaaaccaggttcaaacaatcccagcccataaaaatttcttaagactgctagcaggttaaacagtcttccaaatacagccaataaacttttcattctattaaatattttttgcctgttgagatgagaatagaaacaaaattcttggttttcagtttactcaaagtactatgtgtgacataatttctctagaaattatattgaaatatttaacattactatttaaataataaacaaaaatcagcaattaaaaaaataaaagactgcccaatttggtccccaagtcatagttcgctatcccctactgtagaatttggaggacacatccaagaggttttgtgtgctacatcaagaatgatgtcatgagagaaagaacttgaggtctggataaaaggattaaattgaacccggacattgaaaaaacccctctgctgattctagacaagttgttgtagttcatatatagtgtcaatgcacatccatgttgcctcacctatttaactcatcagtgcccatccctggaaaatggagaaaaggaggaaactcagtctattggtgctcagtctattgggccagtaagctggcccaggaagcaaggaacctagctgccctgcctagcctttcttcctgacagccaggagggtgaggagcagaaaaaggagttagcatctttatccagcaaccaagaccaaaaaactcttagtgttttaatggcatgtgtcaagatagctgagccaaaaaagaaatcggaggattggaagattagacttgactagggagactgtttcagttacctattgctgcataacaggtcactcccaaattagttgtttaaaatgatctcaatcatttatggtctccatggatcaggaatcactagctcagctgggcagttctggcttgatgtcactggcacaactgcaatcacatagagactgatgcagctaagggctggtgagcacctctctcactctcttcatgtagtctcaggcctctccatgtggtctttcatgtggactagttagggcttcctccaagtatggccacctttaatatgttacatggtgacacagaactccaaagatgagtgtctgaagaaagagaacaacagttgcatagccttttctctaacctagccttggaagccacacagcatcagttccactacattctatttatcaagtcagtcatgagtttcaaggggaagggacacaaactgaggcatgacgagcttccggaaaagcacacggaacagaaaatatgtatttggccttttaaaaatatacaacctgcctgtaatcccagcactttgggaggccgaggtgggtggatcacacggtcaagagactgagaccagcctggctaacatggtgaaaccctgtctctactaaaaatacaaaaaattagccgggcgtggtggcgggtgcatgtagtcctagctacttgggaggctgaggcaggagactggcgtgaacctgggaggcagagcttgcagtgagctgagatcatgccactgcactccaccctgggtgacacagcgagactctgtctcaaaaaaaaaaaaaagtatgtgtgtatatatatatatgtatgtgtgtgtatatatatacacatatatgtgtgtgtatatatatacacatatatgtgtgtgtatatatatacacatatatgtgtgtgtatatatatacacatatatgtgtgtgtatatatatacaatctgccataagaactaaaactcatttgggcctttcagtttatttacatatgaatacaattaaaatactcatgataaagaaaatattctcggtcctctttctttgctcacacactccttggaccagcatttcccagactggtaaaccaagacatatgacatgaacaacctgacttatcaccaaaactcaccaacattagcctaaaatattgcatcatgccacctttctggtaggattcagtacctctctgcttggtgattgccctgacatcgcttgtcacacagcgaaataaccaatttatgcgagtaagccctgttgagatatcctgactcaaatagaagagaaactgtctggacacaagcccaaaacacattgtcagctctccactcagtatagtcttctcagtgacagacttgagtcagtgcaatttcatccattaagtaacgggaatagtagaaaacttttgggatgttattctttggattataatttaaaatatgtgtggcaccggtatgtattcatctgctatgtatttatccactcccatttcattgatctctccctaggcacataagaccacctcatttctgagcttctcttgcagttctatcgagaccatgtgactggattccaatcaactgcatgacttgtaggccacttccaagccttaccataaactccactctaatgctccacactttttctcttcttccttccaggctgaactcagagaccaaatgtcaatatgacaagttagaaggaccccagagtcaccacttgtgaggtgccacaaaacctattttgaaatgtgacttgaattagaaatcacctttgtatgtatgtattaacccattaggactttttttttttcctgctccaaaggtgagtaccaaatgaaaaaatacaaaactcaggtgctactggaacctagaacaatacaattttttgttatacaggctgtctcataccttagagagccagatgccaggcacacatcccaaccaaaaagccactgaaatgttagagcttattggtattgcagtataaccaagactagtctgactaatataatgttataaccaatatgaatatattaatgagcagaattaaaaattcacataaatttttaagttaaaacataaaactttaaagaaatgtcctccttgaggcaggttcatctggctatgccccagactcctgggagcacatgcactttctcatctgctattaggaaaacttcaatggtgatgtctgagaaacatcctacagcatttggcagagacagcctctgaaaccagatgaaacccagttctgctacttcctaactcttgaaccactgagcctcagattatgtgatgggggaataaactgttattgtataatgtggttaccactggtgccagttggccaagaagaacagcagaatttgtcatagaaaagcaacagctctttgtttagggaaacatcctaatctgcttataaaaggtgaggcctaccaggacatgactaagatgaaaggacattggctgatgagaattccttgtcgtattggttatctactactgtgtaacaaattaccccaaatcttcccagcttaagttgacaacactttgtttagttttacatagtttctactattcagaagttcaggagcagcttatctgcgtgcttctagtgtagggtccctcatgaggttgtagacaacattaatgaataaatagttaaaagtagaaataaccccactgattctgttttaagtcagagggcatattgaaagcattctagcaaggggaagagcatcagagctgggggaactgggagaaccgagttctaatcccgtatttgtcttgcaaacttgtgtgaaccaagtgacacacccaatttaggcatccacttcagggctcaggtcatccttaaacccctcctacctctgaaacactgggctccttgggcccaatgtgccatcctgacattgtgagcatgagaagtgaggacaggcaagcacccctgtactgagcacaaaaatgtcaggcctttccgagtcttcccaggaaggactgtcttcttcttcccacactctcagaacacaggatcttaccatccaactcactacattttcccccagagaagaaatcccatgtctaaaagcaagagcctcttgttttctttctctttcttcatccttttttgaaaagtctgtttctattgtgacaccaatccaacccattccattgctacctcctttataattttttttaatagtcagcgtatcactctgttgcccaggctgaactgcagtggtcatagctcactgcagcctcgactcctgggctcaagcgatcctcctgcctcagtttcctaagtagctaggactacaggcatatgtcgcacatcactatacccagctaaatttttattattttttttgtttgtttagagacagagcctcactatgttgcccaggctggtattgccatctacttaacacagttccctctctgcatgtcatggtagaacacaggaaaggtgacaacctgattgccaggtgaaagaagagagttcccagcaccaagtgtgcttccaggcatattaggcagggagtgaggcaggaaaggaggaggaatgccagcacacatgtgagcaacttctatatgtctggctccttgcatgcacaattttaagatccttacagcaatcagctgaagtacccacatgttacaggcaaaaagcagtgaggctcactccaagcagttacattggccaataccctgcagcgactgcatatgagaagtgagatttgaatagcatatgtgaacccaaacatggggtaaagaagaaaagaaggaaggaggaagagaaagagggaagatgtatccgtgattgcttccttccagactggcacaaaaatgaaaagctagctctccttgatgggacatgttgatggtatgcaaggttggatccactttgcacacacaagctccttctgctatgaaagagatttaacaacctcaatgaatccttagggtgtatggagtggtgacggagattattagaaaaaaattcttatctacctttgatgtggaaggaaaggggggcccaaagtggtcattataaccaacttgaatcattacttgagaaccagcacagcatatcgtcaagtgtggagactccagaggctgagtttgaatctaagctttgacacatatcaatatgaccttgagcaagtctcataatagctatatgtctcagcgtcactatttgtaaaatgggaacaatagtatctactgagaaaacttgttagaaagattaaacaagtcaatagatttaaagtgctcaaaagagtagctggcatactcttctgtaatactcaataaatgcttgctataataattagtggtgaagaatgtgtactccaaagccagactgccaggattcaaattccactcaaccattccaagctcatgaccatggagaattgacatagcctttctaagcttccattttctcatctgtgaaaggagcgggaaaaaaatctatctcagaagagttttagcagatggtattttccaaagatgactacaacagtatctcccacccccatttgcttctacactgtgactttgccactgccccattaacacgggcaggctcattctcctcccccttgaacctggttgtgactgttaacctttccacaaataggatggacatagcagaagtaatgctgtataacttctgagggtacattagaaaaagccaggtagcctcttcctggttccattgagatgctcacttttaaaacacagcctccatactgtgaggaagcccaagcagttcaagaagaggcacacttgagagaaactgagccctccagctcatagctaagctgagctcccagcactcccttgatagtcagggaagtgagccattttccagccctcaaactgtcccagcagatactgcatgaaacagacacaagctcttccactaagccctgccgaaaatgaatatgcatgagcaaaataaatgattgttattgttctgagccactaagtttctaggtggtttgttatgtatcaatagtaactaggacagaaacgctggggaaatttctaaatgacaataaaataaggacttagcttagtgcctagaatgtgtgaagaagtgctcattagcgatgatcattgttggtatcgttcagtaactttccaaagtcacacagctaataaaggtcatgaccaggattcaatccgaggcctccagtctcacttcatattatgctgaggatcaggaaggtaggcaaatccaatgttcaaggaaccaagcacctcttcttccactgagctggaaggctggagtatcaagatgatgggaacatgggcaatgcctctttgtggctcctacactcaggtttggattgcaagcagagaccccagagactatggatgagggaacattggctaacattctttcttttcctttaagctaagtaccaagagtgtgagatcgttgattctcaagggaaaagctaccccctctatggaaaagtaaaatatgcaaacattaaccagaggatagatgggaatgcataattcacaactagctgtctctctggaccaaagcaggaaggagttggttgaacttcaggtcagagaaaaacaattctagctattgcattccagcacctacgtattcaattaccataaagttttttgcccctggggagaccactggaacctgcatcagcatcaaaacctttcttaatatgattctgcggtaagctgagatatgcagcaccctggcaattgatatgcaaattaaataaacaaaacgacataataaataattaaatcagtctaacttgatgaatgaattaatcatattggagtgatgagaagaagccggcactgtcacccagaagatcattgagaaaaatgaaacattcataacaaggccatttcagcataggatgttgcctcctatattgattacctgcactagcctttgaaaagaataggtgctcaataaatattagtggaatcaaaagaacttttatcaccaagatcatctctctgcagtatatggaattattcattcaataagcgattgcatcaacattttctcatttcagtcttatttaagaataaagtaactctgaaagggagacaagggcagatacttactgatatctcccatcttacagttgaggaaaataaagctaagaccgagtgacttgcccactgtcatatggttggaatgagaggaacttagactcaatttgggagtcctggcctctattaccctcctctgcaccccactgatggggatatttctgtctacataagtgtgtatgcagggagagatgctacagccacccactacttctccaaccatttcccgtaataaatcaattccagattaatttcaagtttatacctgaatacattttgtgcctccacccatttttgccttttgtttagttactgtacatagcatctctttataggcaactaagaaatggaggtaggcatgaggaaaagaaaagtactgtgcagccattaaaattaatggtgaagaatatttagccacataggaaaatttccgcaatatattgctaagcaaaaacaaaggctttcaaactgcacatatagtaatagacacacacatacacaaagagacaaaaagactgaaagcacacgtcaaaaagcaaacagtcattatttccacatggcgggattataaggggtttttatttctctctttgggtatttgtaaatacttttagaaatttatacaataagaatgtattaacttttgtaatttaaattgttatttgtaaaactaaagcaaattatagtggtgggggtggggaataaaatgcttctgaggggtgggaatggtggtcaggctcatgagtgtaatcctaacacattgggaggccaaggcacgtgggccactggaggccaggggttcgagaccagcctgggaaacatggtgagacccagtctctaaaaaaaaaacttgtggttttttttttgttgttgttgttgttgtggtggttgttgttgttgttttaatcagctgggcatgatggcgcatgcctgtagtcctagctacttaggaggctgaggccagaggatcacttgagcccaggaatttgtagctgcagtgagctttaattgagccacggcactccaatctgggcaacaaagtgaaaccctgactctaaataaataaaaatgactctgagcccacatctcatagaagtcatatatgtttcagtattttgttttaaagaggatttcttatcaatatggctaaattttgaggctgtgtgggatgcgaaataatttagaacttcatcccacaatgagatgggatatgccctcaagtcagtggctctgaaacaagatgaaataattacaaaaaagaaaaaggaaggaagggaggaagggaagaatggaggaagggaagaagggaaggagggagggagggagggagggagggagggagggagggaataaaaacctgccaaaggaaaactccctagttttcctggaaatacccaaccctttcttcttttcccaattccctaaagggctaaataactcaaaacagaatataaacttcagagatagcccttatttctggctctataggagattcgatggtgccaaggaaaacaagttatgtatcaaagaaaaatcaactagactatttcagaataagtaagagacctgaaaatatacacttccattccaaaacgagttaaagaaaaaaaaaggcagaagggagaatcatgcagcacatctggggtgaaaaaaaaagagaagtaaatagatttttaagtgaattataagtttgctgtgtgacagcaatgacttgaactctcaaagaaattgaaaaaaaccacagaaacaatatatcaaaatctaaaatatgaaattataagacaataaagtgacatgatagagctaggaaaaaagttaaatcataagttcactgcagaatgcaaaataacataatggagcaagtcaacaatgtaattataaaaaaatcaaaacttgagattatcaaatagaatgcagaagtacatgacagactcagaaaaagcaacccaggagacaatattggatgcaaaaaataaacaacaaggatctagaatgagcgggcccaagaaagaactgagaaagcaaaatagaaagtagtcagtgatacgacagaagaaaatattcataatcttaaagaaagtctaattgtgactattagcaggactcacaggcaacagaaaaaaattactgaaaagcaaccaatatggagaaacatcctagtgaaatctctgaataccaaggattaaaatagaactgcacaagcatgtcattcaaacacttggtcacctgcaaaggaaaatatcttttagcatctctagatttcaggaaatcatccatgaagatctgaggaagaaggtattattcttcacccagccaaccagttattcatataaagggtgaaaaaggaggaggagaaaagagaagatgatcgtgaagacattagaagggaagaaaaaagatgaaggaaaagaagagacaaagatgaagaacatattctcaaaatacaaggaatcatgaatgcactattgctgaactgaaagctaggagtcacattctaaccaaaagttcaatcaaaatatagatctcaaaaaatgagtaagcagtaatatgaaggcatcttaaatttttggtgaaactcaaaaatagaattgagtctaaataattatggcatagttatacaactttttaattgttaaactttattatttaaaaaattttttaacctacagctagaaataaaagtagattgtgggtattccctatagcaaaggtggatactcataacaacaacaaaaaaaaaacagatttaaaggtaaagatatcagttaaaactaaaagcagaatggggttaactcaacagtaagacattcttaaaatgaatccaaaaccaataaaaacaagtatacaacatttatcaggaagaagactaaagctgtaactcaaaaacagaaaataaagacaaaaatataccaggaaaaaaaaattctaagaaaatgaaagcagagattattcttttatacatgattaagctggattcaacaagagaaatagtattaagttttaccaagaaagatcactttcaaattgacaaatggcacaatccacaataaagatataagtgtcaaaatgcccatggtctggattacacagtatcaaacattgtaaaacaaacaaacaaacaaacaaacaaaaaaacaaacaaaaaaaaccaccattgaaaatactaggtggatgttgtggggctgatatggttgggctttgtgtccccacccaatgtcatcttgaattgcaatccccaggtgttgagggagagacctggtaggaagttattggattatgggggcggcttcccccacgcggttctcgtgatagtgagtctcacgagatctgatggttttaaaagtggccatttctcctgtgcatgcactttctccttcctgctgccttgtgaagaaggtgcctgctttctcttctgccatgattgtaagtttcccgaggcctccctagccatgctttctgttaagcctgtggaacagtgaagtcaattaaacctctttcctttattattacccactcataggtagtattttttatagcagtgtgaaaacgaactaatacaagggcagtgaaagaaaataacagcagtgactaatcagaaagataataagtattaacgtaggggatctgattaatattattaaaatcgatataaaagctttacgcatactttgtgtactgtaaatatttagttccttttctaacactcactaaatcattataaaatcaaccaaaattaaacaaccaagaaaacaccattaagttttcaaaaaagaaattaataatacagattacagtctccatttacactacaaaagccaaaaattaatttcaaaagtagaacaaaataattatttcaacagcttggaaataatttttgggtcaaaaataaaaccaaaatagcaattacagatttttagagaatagcaataatgaacccaatacatatcaaaatacatggaaagtagccaaagtataccaaatgtaactttcatagacttaaatactttaataactgagcaagaaataaaatgttaattatttaagaaatcagctcaagaccctagaaaataaagagttgaatgaagcagaaagagaggcttaataaagataaaggcagaaaacaattcattaaaaaaacagaaaaacatcagaataaataaatctaaaatctggttctttgagaaaaagaaaataaactattaatagataaaacatgaattaatctcatcaaagagaaaataaaataaaagcataaaccaaagtagaaatgagaaggaaacagttacagaaagaatttcaaagtttcattcagtagaaaatacttcatctgtcaacaaatttgagaacttgaataaaattataatatatatatctttcaaaagagcactggatccaatcattgtctagggtaattcttgtgtctttatttgcttaattttattgatttattttttgagacagggtctcactctgtcacctaggctagagtgcagtggtgcaatcatagctcactgcaggtctaccaactgggctcaagcaatcctcctgcatcaggctctcaagtagctgagaatacagatgcatgccaccacacttagctattttcttttattttttgtagagactaggggccggtgggagggtctccgtgtgttccccaggctggtctctaactcctgagctcaagctctcctccaacctcaacctcccaaagtgctcggattataggcttgagaaaccacgcccagcctcttgtgctattttaagtcccttagaaccttgctacacaaaatgtcggccctgagccagcaacatgggcatcacctgattagtcatttttacttatactttgtgatttaaaatcccttttgcaatacagatttttaaaaacttttaagaagtatctcgcattgtttttatggtttcctgatggttcaggttactgctagttagaaaggcagactctcaagccccactctggacctactgaatcaccatctgtattttaacaagctcccagatgattcataggcacatttgagaagcatggttttagatctaaagaggaaagcttccattctttaagaatagtatgtaagagatctacagattattttatttatacagactcaaaagtccaagttgaaatttctagcaaaaagaatccaacacttcattaaatagataccattcaacaaagaagtggatttcatttcaggaatgtgacaatagtttattgctaaatttattaagagaaaagaagaatataagtgaatttactttaaaattattttaggctggggaaggcttttttgagtacaaccccaagccaaaaatataaattcagtggttgaaatacttcataaaaacttttaaaaatctgtattgcaaaaaacgttttaaatcacaaccaagatgtaaaaaaaaaaaaaaaagactacaaatatatatgaagcttcaaagaggggattattatctacaatgtacaaagagctactaaaacttacaaataaaaagacaatggatgaaggatattaatcacttcacaaaagaaaagcaaatgatcaataactatgttcgtgtcttccctcattcaccagcaagcattaaatggcactcatctagattctgaggactcagcagcaaataaaacaaggtaacttcccacaagattatctaactaataattaaacaaaaatgtcaactaatagactggtacctgacagactggcaaaaattcaaaagataaattaatatcctgagtcaacaaatacgtcaggaaataaacaccttcatacattcatgatgggactttcaactgccaccaattgtgctgcagtttaataaaataaggcatagcttctaacagaatatatccatagaaaatagacaaataggtatgaagatcttcctcacagcattatgcacaatagtgaaaagaaccttcgtgtccatcaacagaagaatggcacaatagcatcaccaacatttttcatctattgctatttgttcatatattaggtatgtattatttgttatcatatcaatagcagaataaaatactcttgaaatatttatttcacattatttcagatccaaggctaagatatgttagaggcaatagaaaccctaatacattttacatgacgatgatgaaataacttgtgtgggaatttggctttgtatataagatacatatgtttagggatgtaagcatcactcaaagcttcctgaaagacagatccaaggctgcctatgtgtctctgatagctgaggctgaccgtctcagaaccacactcaaacacagtgtggtgttcagatgccttcatcatcatgttcctcctatagttcacatcccctcctttgcatctcaccagcacccaggaaccagggtgctttttaaaaaaacacacaagttaaatcccagctcttcctccattggtttcttactgctgtaaccacaaaaaggtaaggtcccgattctaatggcccacgaagtcctgagtgacagtcaccagctcctgcccactctccaaccgcatcttgttgcttctttcctgtgactcccggtgctctggccacatgagccttctaacaattcccagagtattccaagctctgtgtcacctcagggactttgcacgtattctcaaactgggtgttcttttccctgttctcttcagaacaggcttttctgtccttcaagtttcagcctaaagatgctctctgcagcctggctctactccctggccactacaacaccctgcttgtctccttcaatgcacttcccacaatctgggggaaacagaggagagaattggccatactttgtgcattaattatttttttacttattcactgtgtgtctccttcactgcaatgtatgtttcagaaagctgaccctgtgtctattttgctcttcaccgaatccccagcagtctagctcagagcctgcaatgctgacggcattcaaattctggtaaatgaataattgaatgtgaacacaatttggacagcagatcaaaaaccttatacaattttaaaagaaatatttgtgatcatcttttcctcaatcctcagaaaataatcacaagaagtacacaaagattaatatccaaagatgctcgttacaacattcttctaacagcaaaaaccagacacaacctacaagcccaacaagaggaaaatattttagttgatatataggatggaatagtcaattataaaatatatcataatgtggtaaatttttaaaggggagtaagaaacaatgtgtagttggaccctgaacttacaaaatcagcatacaattctatacgcaaaatagaggaagcatatattacaaaatgagtcatggtttgtcttctttcatatatttcctacgttttccacctcgacatatttttaaagttttgacattgagcaagaggatacatttttaaaacagaaatgcaaaataaacatcatttttaaaaattaataaaagaggtcactcctccccatgagtataacctttacatctcatgagaaagaaaacttttattttctaatatattttaaattgtgtgagatacttaaaattgtgtgagattctatcaacatgtgaagcatatgttaattcattctggttctcaaaacccaaggaaagaatcattcatatgggctttcaccccaaaatctacagaaaccctctacatcctccagttctcctgtatctgcctgcctctgtagtgtctgctctggtctctccatcagtgtctctctttgcttgtgtgtttcacgatcagcttccctttgaactcgacatccttgccacccctattctccccgggggctgtcttttctcctcagttggccatgatatgaaaatagatgagaagcatttattgaactgtctttgtttttctcccattaaaataaaaccagataagtgaaatcatctgtttacatttctctcaaaaagaactgcattaaattactattggtcctacaggtcaccgaccctccgctgctcagcagtgcccctcaccagaggcccccagaaagacatgtccttgctgagaagtctagcacttgggcacataagcagacactgatgataagctgattagaactgcgaggcagggtatagtgtggcaatgtagagtctgcacagaagtccctgagaccacacacagtaagtgtaaaacttctaagaggtcacaaaaacagtatcttgttctaattcgaggggacccaccttcatacatcagcatgaactgaacccaggtgaatcttgccagaacaatcacagaaattagaacaatctaaaatcaatataaagagaagtctagagagagacgatcagagctcatgagatcctgaagtcaatcaaaaggctaaacaggatttgaaacctcatcacttatgtagaaaataaagtacccagcagagcaaaagtgaaagctgtctcctaactatgcagctctctcctttgacaatttaaagggttccaaggaaacagctgaacctcaggaacagaaaggtattttttggttctgatttttgatgtggaaacagaaacacatatttgattttaatggttctcagaatggaaatagtggcttctgaatttaaatacaggcagcatcagatcttattattctgctatctttagccatttttgccttcatgcgttatttatcatttcactttcaataactttgatatgtaaattaaagctactgtaccaaatgttatgatttagataaagatctagaaacactaatatttctcattacggattttgcttatccagctgaatccaacggaattatccaatttgaaccatgtaggggaatgtctggacagagctcagcagacttttgagaccatttaaaatccaaacccaccacccaaagcttttctaccgtaagggcttctcagtttgttgatgtggcacattgtccggcgacttcaaaatcatgactcagctttctttttcaaatgcaggcagaatcattccctggcccagtttgaaaagttctgagacttcaggctcagaaaaatagttagcatagttgttgatacttcaggcattatctgcacttaccagctctgtgaccttggccaagttataacctctctttgcctgagtttccttaactgtaaaatgggtgaagcaatagaaccctctatgagtgtgaaataagaaaagccaagtaaaagtgctgacttagctcagtccctggcacatgataagcactaagtgttagtaaattattcttcctgaggcagaatgctgcaggagtggctttgccacagatttaaggattcactctttaaagactgagaaatggccatacagtcttcaatggactaaatgtttaggtcccctcaaaattcataggttgaaattctaaccccacgaggtaagagtattaggaggtggaggcctttgagagataatgagataatgaaagtgaagttctcatgaataggattcatgaataggattagtgtccttaaaaaggggctccagaaagatcccttgccccttccaccatgtgaagctccagcaaaaagatgaccacttagtaagcagacactctccaaacaccagatctgctggtgccttgatcttggatttcccaggctccagaactatgagaaacagaccaggcaagatggctcacaactgtaatcccagcactttgggaggccaaggagggccttgcctgacttgtgatcaggagtttgagacgaggctggccatcatggtaaaaccccatctctactaaaaatacaaaagttagctgggcatggtggtgcatgcctgtaataccagctacttgagggtctgaggtggaggcatcacttgcatccgggagatggaggttgcagtgagccgacatcacaccactgcactccagcctaggcaacagaatgagactccatctcaaaaaacaaaacaaaaaaagaactacgagaaataaatttctgttgtttataagccaatctatggtatttttgttacagcaacccaaactcgaattaagatacaggctcctagtgagcccagagagccacaaagaaagaaagtctaatgactctcttgaccactcatgctgccttccattgcccgtctcctgtgttctgtgatagtcagagtgaacattaagctaccttggtcactcaagcacctctcaggtgggtttgggtctctccgcctgacttcacatgtcaagggcttccttctggaaacattcggaaggcttcatgagaacaaggtggcccatgagttcttgttcagctaatgatcctgataccttggtgagcaagaaagagctatgggcagcaatggcaagacagggcaaggagcaatgggagctgtgagtctacttcaaggtcaatgaatttttccccagcagctgccacgtttcttccccaaataagtcagaacatgagaactatcactgaaaaaaaagactaaacatagacaatatttcatctctcaatccatctattcaatcatttacccactcgctgacatatcgttgcatcccctgtgcccagccctgtgagagaatctgaaatcccataaagatgcccaggaggcagccctcatccttggggaacctacaggctactggggtaaaggcctatcaataaacacagcccagagtgttatgggccatgaaatgctgagctgggatgttgaaagacggtagagacacaggcaaaaaggaggttccaggaaagggaattggcaggtgcaaaactgcagaagtgagaggggcactatgcattcttcaaagagaagaagggccaggagaatggtgtaagatgaacttcaggcctcaagggaacttggaggcaggctgaagcactgactgcagctgagggcagtggagggccatcccgtgacgcgtaggcaggaaagtgacatgctggatttgcatgttaggaagatcgttgcaccatctttaccccagtccacacttgacttcttccattgactgggcatctgcgacgatggctacatttacataaattctgatcatctgaccccctcagagacccagggttcctcatacttcagtactctttatttcaggtttagtcgagcggagcagagaggaaaagcatctcccagctggctgcagagctgcatttccagctgcctgatagatttcaccaatctgccctcccagagccagtgtgaactcaacacatccaaggccaaactcatcatctttcccaccaaaccagctcttccttcttagtcttccagtcacccaagttcaaaagctccttcttactacctgctacatcccatccctcaccaaggcctgctgtgtcttccttcagaaatgtccccacctcctccctttccttgcagtgccattgtttcaccctgtctccatgtcgtgaactcttcccacactgacccacctgtgtcctctgtccccatccccccaatcatcagcctgtcttccattatcaagtcacttcctgccaaaactggtagactgcaaactccctgcagtgtagaaccgatgatcattggtaaggcttccaagacccaagtagttgggtctcaaagaggctttccagcagtatctccttcctcacactcaccttgctgatcctcacactcaccttgctgatcctccccattgagcaaatcacccaatccacctatcacatcctactctggcttctgctcatagtgtctactggatcaaatagtgttccccaagaacttatatcaacctagaactttggaaagtgaccttatttggaagtagggttggatgagatattgaggtaaagcatttagcatgcagtctcatacttagtagcaaaacgtatactggttgacagcatcatcgtcaaccacaacaatcaacatcatcatcgcattatcattgaactttgttttaaaataccttgcatcagctacgaacacagagttgcatgaatccaccacttgcaagaaaaaaaaaaaaagaataaaaggcacccttcaagattaatgcccccactaaccatgagtactaagcaggttcttcacgtatcaaggacagtgtattattaccctcataaaattcctttcttcctaagagattaaagagctggggaaatttcattccactcaggttcacaagtcccctgagagagaggcaacaggtgagcatcacttttccattgtcctcaggtgtgtcaaagcagagacaagaatcaaggtggccatctctagagctggaggctgctgtctccccaggccttgagagttaagaaaacgtgggccatcctcctgcttattcgttaggtattctttgcctactctgaaagcaaattagtacgctgcagggtgttggttcttattcattcacttcttcactcattcattcattcaaaatcattgaatgagcctatgttcccacaaactctactaagcattaggcaggctacagagaataagaggagccagagtcaagtgtggccacctaagaaaatgcccacgccacaaatggccagagtctgtcctgtctcctgaatatgaatggggaatgcttctaaaacttcaccagtcttacatgtctcctcctgtaatttttaacagtggaatttaaaaattcaactcaacttcaataaatactccaaaagaagatgatcccccaaacaggagtctttcctggccagaagtaagacccaccagcccttctgcagccatcatgctccagaatcaaagatacacatgaagtggagatcgatgcctcaagtgaagatgctccaaggaatcagagccttttattgttgctcctacctggactgaaatgaatctgagcataaaatgagaggaagctggcaggtatttacagtcatagcagcatttctcatgatggcccaaaattggaatcaacccaaatttccacccatggatgaacagataaacaaaaatgtggtttatacatatgtgatggttaataccgagtgtcaacttgtgtctgtgagggtgttgccaaaggagatcaacataagtcagtggactgggagaggcaaacctaccctcaatccgggtgggcaccatctaatcagctgccatgtgactggaagaaagcaggcagaagatggaaggacttgacttgctgagtcttccggccttcatctttctcctgagctggatgcttcctgccctcgaacatcagaccccaagttcttcagcttttggacttttggtcttacaccagtgacttgctaggggctctcaggccttcagccacagactgaaggctgcactgttggcttccctacttttgaggttttaggactcggactggcttccttgctcctcagcttgcagatggcctattgtgggacttcaccttgtgaccatgtgagtcaatactccttaataaactccccattatatatacatccatcctattaattctgtccctctagcgaaccctgactaatacaacacaggatggaatatttttcactcctaaaaagcaacaaaattctcacacatgctgtaacatgaatgtaccttgaagacatggagctaagtgaaataagccagacagaaaaggacaaatattgtatgattacacttaagatgaggtacctagagtagtcaaatttacagagacataaagtaaaatggtggttactagaggctgaggggagtggggaatggagagttagtgtttaaagggcacagagattcagcttcaaaagatgaaaaagtttgagagatagatatcgggggtggttgcctaacaatgtgaatgtacttaatgccacttaaatgcacacttaaaaatggtgtgttttgttatgtatattttagccacaaggaaaaataattagtgggtgcaatcaggagacttctccaaagccatgagaagaatgggcagtgctattaaggatgctgctggtgtctgctcagttcccctttagtgagctggtgcactctaccctcgccctggggagttggctccttggcagcccacaggagccaccgggaggttattcccccacagactaatcaccatcaccatggggatggccagtggacctccatgaaggtgcaaaatatctcttgcctccaggtggaactgagtctgtggtgcatctcatgccccagggctcacccacaggcttggttaactttcttgccctcacctgcttgacctgcctcccttgctcttctgagagcaagccctccataaatcattcacaggaatccctgcctcaggctctgttggaaggacagtgttcctcaaccttgttttcattactgccctcctaaggagtctttttatgaatttttttttcctaatcacccactaacaggtacactgtatatctgcttatgtactgtatatatatctctgtgttttttacttaaaatattgtaatttttttcactctctaataactcatttttattcttttggaagtgagttcatctcctctgaacatgcctggtctacagaacctgagctaacgaagtgtggattcgcctaaatgacccatgtgtggggtatggaattgtccctcaaagcatcgagagcttcaaaatgatttctgctgccatcaatgcattttattcacaacaagcaaccagcaaaccagccaatccaagaaaatataaaatctgccacctcttttgtgcccagagggtgtgctaaaccctgaagagacagaaaacaatgaacaagccagattcttgagtctgcttgcatgggaaataaaagaacaaacaggtggtacaatagctaagacagaaagtggggggtacatatctggaagtggtctaccctacccagagaccctacctttttggagtctgtggaccctctagggatacacagagacaacagcaattcactttgctgtcacaggataagcactccttgaagaagaaaagggagaactactgctgttactgacttgttcactcattaattcactcagcagacatttctgagcacctactttgataccctacactgtgctatccctggggatacaatacaaacgcagcaagacatagggagctagaagaaagggctccaggcagacagaactgggtttgagtcttcaatggctttgtgatcttgggcaagttccttaagcacttatgttcctgatctatgacatgaggagaataatagcaaatatctcaagggattgttgtgaggattaaatgtgatactgaacataataaggcgaggtcacttattgtcttaacacacagaaaatactcaacacatactaggtattgctgattctttcattaccaactggatacattcccttccgtcaagtacttggtggagagataatgattaaaacatagtgccatattgaatcatgggaaaaacacatctattctctcatttttggaaaaagagttccccctgaggacctggtaaccacatggcacttccctgacatgactcctggccattcactctgatggctggaaccctcctctccaagtctgtcgctctgttatctgcatataacaagataagcctacacttccagctcatttggcagatactatgaggaactaatgcctgcaactgtcaccatttagtgaaagatttaataaacggggtattttttcaagtccaatttcacaagccaagctgatgtttcattcccccagcattaatgctgccacacgcacatcaaaatgggtaccaagggacagggcattattttccagccacagtgagacacccagtgacttcagagaccacagccatatatccacatgaccagacgaggagaattaaaatcggcattccggggatggcatcaccaacactgagtttcagggggttatttatttattatgtgataatggcccaaaggtatacactactccaaaatctgccatgaaaattcaaacatctttgtaatccctgtttacaaagcatacagagaaattaaaacaggcttaatcgagcagtgtttgtgcatattaatgagcctaaattctaaatctggattttggaaataaaaagggtaaaagaggattcatttcagactaatttgtttttgaatatgacactttgcatgtcaaatagtataggggatgtgaaagtgggggcctagataagcattttaaagcatttccacacaaagtatggggcataagatctgttaaaggaaaagaaccactttccatggtctacctaagactttaatgacacaaatctctcttcagtctcctgtgtcctgttcagtgagggaccaataaccgttctccactgtgaccatagaatccttctcttttatgccctgtataaactttcctttggctaatcattatttacaatgctataacatgagtgctgggtgtcataagagacatgttcttttaacttgtacgctaaggcacttgtatcttagaaaacagagaggtagagggaggccagcctccgaattcagaatcagatagaccagagttcaaatctcagccctgcctctcaccaactacaagttatgtactctctcctccttgcttcaccttccacatctgcaaaatgaagtgataattcctatcttttcggccaaacttacaaaacagaacatagtaggtgtgcaaaagtgctaactccattctttgtgcttttctttggagcaataataaatcacggagtgaccaaaagtattttacgggtatcataattcagtgaatagccaacacccaatttcctatggtccatgtatgcaggaaagttaagagaaaaatcaaaaagatcccaaaggggacacttgggaacggggatggatattgggatgggcatgaacatacacacacatgtgccctctggcttgctttgcttagcataaggtgcatgatacaagcctggcaggcctcccgcactaaataagagttagatgtgggactgtggaatcagatatcctgggctagactccatgctctgccccttacaaatgactctgggcaaatcacaccagtcacagcacccttccagagactggtgtcctcactgtaaatggggacagccaatgcaacctccctagctttgcaattcatataagttacacctgtcagcagattcctttgcagatataaacataagataagaaaacaggcctgcaggattatgccccaatcagaaaggttcatagaataagaaaacacactaagtatttcaaaaagaaaaaaaaaaaaaagcccacgtccacattgcgacatgtcccctctctcagaatttgaccttagggatcccagatggttccagaccatccccaagctgaaagcatcctgttctctcctgaggattatctgacctgagagccccctgcccccttcactcataggtcctgtccaagggggtctacagatcacacaagagttcagagtttggggacagggggtatggagcaaggtccccactgggacagctgcacccacagcctccccctcttttccccatgtttcctccagaccctgggcactgtggagccaagagtgggctggccatgctgccaagcaggacccttccttgctctgccatcaggctctggcttataacagattctcactgttccaaccagcctctccccttgcctctggccctctccctctgttacttccctctgctgtctcgcctcatccttcctccctggactgtggtctcccctttcctttccctgcctgcatcagcgtcccctcctttccctaccacagctctccatgcctctgtctcggttgctgtctctgactctctgtctgctcatttctctaactgctctaaggccactttttttttttttttttttttttttttgaggcagagtctcattctgtctctatctcggctcactgcaacctccccctcttggcttcaagtaatcctcctgcctcagccttccgagtagctgggactataggtgcatcaccacacccagttagtttttgtatttttagtagagacaggatttcactatgttggccagggtggtctccaactctgacttcaagtgatccgcccacctcggcctcccaaagtgctgggactgcaggcatgagccaccgtgtccagccctctcactgcctatctccttttatgtttctctccttccctctctgtcagtctctcattctctttctcctgatttcactgggtattcccccatctctgtttctccctttcagggcagggactagggtgaggttggggtggtacttgacccaggcacaaaatttaaggaggtgccaaaacactcagtaatccaaacaaatattactttaatgtaatatttttaaaaatcaaaattaatgcaaaaaaaatccctgttgaacaaagaatcaaaaatacaaggaaagacaggatctgtccaccactctactccttgccccaacctaatccattcctagtctgaaacattattgacaagaacaggtggctggcccatagactgtagttcatccatttaatttttttaaatattgcattaaaatattactgatctcgatgattacattctgtgtaaaggggcatgctgcctgtgtttgggccctgtgacctttctgtgcgtttccttccctgtctcttctctcattcctctctgtttaccctcaccctccttctctgcttccgcccaatcgcatctccctccctcctccggcccacctcggtcttgctctccatctctgcccagccccgtgtgtgtttgcacaccttgtccctgttatgtctgtctgtcttccccctctgcatctgtttgtccccacttctccctgggactgactttctctctctcccttgtcaccctccccacctctcctcacttgcctgcacctgtggccatcccgtcaagcctgagcactgccaagagcacaaggaaggacagacgagcttcctcctggcaggaaagctggactgggagggaaaagctccaaattccatcctgtctcagacctccaaatctgcaccatctgccagagctcctgtgaagcctatcttgagcaatagatgccctgtgtcccagaggtagaggaggaggcagctggcagatgctgaagtcacacgccatggatagaagacagtgggcactgaggcagtgcgcagagcaagcctgctggcaggagctggaggtgctgcagttgggagggctcagattcccctagaaagggcaattcaccctccatgtggccatctcaggacagcaactagagaagtgtcacaggtggtatctgcctaacgtgcctggatgtgtcggggatatcatactctctgtttaacttaaccctaggtatgatttttcctattctgcaactgaaggaactgcagttcagagaggttgagggatttgcccacgggctcacagcttgattcaaacttagaacatctaagggtccaaaaggtctgaagaaccagcccagggccctttcctttaccatgttatctatttaagaacaaacttctcacaaacccagaggaataagaaataaaggccaagcaacccaataactctgtgttcattttttggaaaacaacgttcagagttggctaaatgatttgaaaaaaatattacattctccagattacaccaaactcagaataaattacaaatggattaagtaattaaatgcaaaaagaaaaacataaaacatctaagaagaaatacaggactgtatcccatgatctgaaggatgaaaagactattttgagggtgacataaaatcatacaagaaaaggttgactgattgcattttttaaaattgagagttttcgaattgcaaaagacatcgtaaacaagattgaaaggcaaatgtaaaatggcggggggtgggaatcttcagtctatatgataaaaggttaatatccttaaaatgtgaagtgtgcttatcaaccaaccaaaaagtcaaataactcaacagaaaatatgaacaaaagatttgaacaggtaatttatggaaagcactcaaccaaagcaaataaacaagaaaaacaacgcaaacaaaactcatggattcaaaacttcaagttaaactgatacacctttttttcacatttgaagttagcaaagcttaaatattcactatcatcaagagtttaaggagtggaaaacttttacaggattagggagaatggatattgttacagccctctattgggaaatgtgacaatatttattaaaacttcaaatgcacattcctgctgatccattcatttcactcttcaaaatttatcttactgaaatacatatatcacatgcacgtttatcacaacattgtttgaaaaaaagcaaaatatttgaaatatcctaaatgccctacaatagtactgagtaaattatactatatctaggtaatagaatacaatacactcaataaaaggagtgaagtaaacctatatgagctattgtagaaagatcattgtgatggttgatttgggatgtcaacttgactggattaagggatactcagatcgctggtaaaacattaattattctcagtgtttcagtaggcacaaaacccatcccatttctgctaaaagggaagccaaggtggtttggcatttgattagaataattgggctgtggccgggcacagtggctcacaccagtaatcccagcactttgggaggtcaaggcgggcagatcacgaggtcaggagattgacaccatcctggccaacatggtgaaaccccatctctattaaaaatacaaaaattagctgggtgtggtggtgcatgtctgtaatcccagctacttgggaggctgaggcaggagattcacttgaacctgggaggcggagattgcagtgagctgagatcacaccactgcactccagcctggcaacagagcgagacaccgtctcaaaaaaaaaaaaaaaaaaagaataattggactgccccagctgtgtctgtgagaatatttccaggagagactgatgtgtgagtccatggactgagtggcaaagatccaccctcaatgcaggcagcaccatccaatcagctgagggcccagatggaataaaaagctggaggaagagtgacgtctctgggtctcccagagccaggagcgtttcttctcctgcccttgaacatgagaatttcaggttctctagcctttggactctaggatcactccagcaaccctctgggctctcaaaactttggtctcagattgacagattgatagtaacaccctcggcttctttggttctgaggccttcagacgtggaccaatccctgggtctccagcttgctctcagcctccataattgagtgagtgaattcccctaacaaatcccctctcctctccctctctttctatatatatgtgagtgtgtatgtgtgtgtgtgtgtgtgtatatatatatatatatacatatgcatgtgtgtgtacatatgtgcatgtgtgtttgtctctatataattacatatataagtaatatgtaattatatatgatatttaattatgtaatatatatatatatatttatgttatatatatatttggttctttttggatagcccagactaaaacaatattcaaaagaaaaaaatgtagaacaaaatacatagatattatgatcccttttaagaatacatgtttatgtgtgcctgtgtatttatacgtagggaaacagacctagaggcacagacggcaacagtgcatgcatcagggaaagggagggacaatggaatactcactcttcaaacatcaccctactgtttacatttgtacaatgagtgcctgttacttctgaaatcttaagaatattcccataattaaaaagttggcagacgtgatttaaaatagaacagttttgcaaatggaaagcaccctttccaccccaaccctgccatgccccaccaccctatctgatcagtgagagcggcctgccctaagcatgctgggaatctgagataccgctcccatgcacacgtgacatgcatttatttgtaattaaacttatttatgttttgaggttttcaaggccccatgacatattctgaagcaaagctagaggaggcactgccttttatgtaatcaatgcttcatattttgtgttttataagctctatctttcccattgtcagaaagatcctattaaggatgatgctgctgctgctgcctattttactgaagaactttaggcacctgcttagagccaggattggaacccaggtctgttgtacaataaagctcacgtccatttcaacccaagccctgaagatgactggagacactccatgccaactgaccaaaccagattcaaagatactacacagaaactgcttacccagggtactattaaaatcaagaatatccaagatggatatattaaattatcatgtgtatcctccctaaaaaatcaacaattaaataaagaaattaagaatacagagttaatacctactcaaaggagatgatggtgagacctgataaggtaagctgacagagaaaatgctcctctcatacaaaccccatctttgcaaagtcctgatttgagagactacagagagaggccctacagaaggcatttcctaaacacatgttacctcaatttgttgaggaactgcaactgtaatagctgagcctgtcgctataaaaagttctggtcttttccctcaggttaggaccacctctcaaaggcaagaacctgataatttttgcccagagtccacactggagcccacccaccttggaaaccaacagtggacgtgaactcagttggatggggtaggtcatacttccagacaagcagaggaccagggacaggtgggcaagttccctggtctgttctgcctgggccccagatgtgagatggctgaatgggggctgggctggggtgtctcaggggccctagttaatcttggccagagtcctttccaacctagccctaacagaagagatacagacagttaaggtattcagatcactgaagcattgttactaggtgtaaatattaacacctgcactcaactgtaacagaaaccaaattaaattaacctgacctgaatgaattagggttttatttttctcacataatgggagatacaggaaaaaaaaaaaaaaggctacaggcattgagtcaagggtgtatggttgtcaggctgagaactctgcaattctctatccacatagtgtccctgttgtcacagatgactctccacctttagcatggtatccctgttccagccaggacagaagagcagggaaaaggacaaaagaggtatgagctactgagttggcttcccttttaaggatctttcttggaagccccacccacagctttctcttccacctcactggccagaactccatcgtgtggtcactcattctgcaaagaaggctgggaaatgcagctttgaagctagacacattttccaaaatagtcagaattttctagtgagggtatgcgaagaatgcatattgggtaagcaactagcagagtctgtctgaccagataatcaatggggataaacttggtgaattcttcagtgcactgatggtggaatgggtggcacataagattagaacgccctggattgctggcaatgggcccaattgttgcactagaggagactctcaaaagtccaccaacacaaggaaggcaaattatccttgcaccatagacacctgtggcttttccagtctcatctttgccctccagagagctagatactgagtagaaactaataacattaagtattaataggccttacatgattctatttcctttttaactgaggtccaaagatcatctaaggtgatggtacaccagtaacctaagaagtaaaagagtaggtcaaattgcttatcctatgtctggagagggggctgattccaagagctgagcatgctgggaagaggagagtctctcccagaacaggcagagaggacctgcattatggcaggggaggagttatctgatcccatcaggaggcggagtgaaagctagaagcaaaaatagaatatgtggccaaatgaggaggatgtaacagctgggtaaaaaagcataagaacacacaaggctgtgtgggagggtgagatgccaggcagccttcagcagctgcagactttgtcttccaccttgctagagcctgatattgaagagttggcaacatggttactccagacctgcagggatttaaagggatatttaaagggatgtaattgtaactcccagatgcctgaggacactaagagtgcccagccaaggcaaaatggttccaggggcaaaggccctcatagcaagggcaggtccctccagcctaccagcctatctcttctgaaagaaggagaaaagatatatacattgatcttgatgttaagagcttctttatcctaagaaatatgaaggaccagaagtatgaatctgtgcttgatgattatagagatgtgtgtaacatcgagtctgcaggaccagacccagccataacagaaaatggccctacacctctgaagtgagcccactccccaaacaaggtagattgctcagcctctgtgacttgaaaaactttgacctattttgcataatgactgtgtgtgacctgaagcatcctcctcaacatttgtcaactgcatgctcatgctgttctggcactggctgtgtgcaggtcataagtgtcagcttcatatgagggtaaaccaagtgctcatcccctctgacaggcacaacaaaagatgctcccctctgaggccaaataggtggcccatgctgccaagatttcctgctcacacaagcctgcagaaagtccatgttaatttccaatcatgttgcttcccttcctgagtggaactgagacaggtgggacctgaggccggctggttacttggcatctcctcacactaatgttccttaaatatctgttcaatgtttagagaagaggcagagagctgcctgagcaagggcctagaagccacggctgcttctcctctcatctccagcacagttcagctctggcccaattctgcatctctccctcaacgaagccctgtagctgccctaacctctccccataaaaggtagctttagaggctatgtcttgttattggagatcaccccttggcctcaccctttaccccagatgtctcatcaaagtgcctctggcccccacactgaggttcccccgagacaaacatcctggtaaatatagctttgtgtgctttcattatttattcccagggatgcctaatgcccctgaattgcctggcatcttggctctgctgcctgtcagtggatgtgtctctgaggacagcaggctccccacagtctttgcagcagcccaacacggggagctggggaatgagcacagtgagtatgagcaccgtatccaaggcacagtgcctgggtgcaaaacaaacccctgctccaccacagactggctctgagaatatgggcaagctactcaacctctctgagggtggcttcctctgcataatggagcaatactagtgcccaccttatagggttgttgtgaggagtaaatgagtgcatggatattgttcatcacagtagttgacacaaaaccaaggcagaattagaatttaatattagtatcagtgttactactaatgcaagagggggtaaaaaaaaatggctccaaggctggtagatcatgaggtcaggagttagagaccagcctggccagcatggtgaaaccctgtctctactaaaaatacaaaaaattagccaggcatggtggcacgctcctataatcccaactactctggaaactgaggcaggagaattgcttgaacctgggaggtggaggttgcagtgggccaagatcacaccactttactccagcctgggcaacacagcaagactccatctcaaaaaaaaaaaaaaaagcctcacaaacattcccatgtgaattgaatatgcaacttaaaatgcttacatgaaatggtattaataaaagtattgacttgagtagaaatgctggcttggccactattccattgggcctgcccaatgtccagtgttagatcccaagagctggcaatgagactcttccaagatcatccccaatgccatttctcaggccaacacatgctaggctcatcacaacctcacagctgccaatggctccagcttccatgcccagcccacccctgggagaaccaactctgtagcctcactgggctgctttgggtacccaaaatgtaccatagacttcctggtctcttgaccatgctgttccctggctcttctttgccatcctgaaaattttaaacatctcaaaagatcattcatacactaccatctttccaacaccttccttgactgacagaaacacagccatggcctttctgtggtcccagaagctttgttggtgtctgtatccacttacaggataacctgttctcccaatagacaatgagcctcctgtggaatatatctttagctcaccatgcctgatactaactagataccttacaaatgtttaatgattaaaagaagtattagagataagttttacttggcttgtgcacagctgtgtatgcacaaacacatacacacaaggtctcctaatgactatgtgaaggcaatttcaatgtggaaaatacaacagtatcacaaaagttcagtaagtcagggaaaccaacttccagaacgcagtccatccttttacactgatggtaaaagcattagcagcactttggcttgtgtggtacttaacagtttacaaagcacttataaatggaaggaccctgagggttggagttggaggacacgttctcaacatctagcctaatttcctgggtaaagcaggaatctcctggaaaaaatcatcactcagggttctgtagcctcttgccaatgcatcctgtgccccagagtttcctacctttcagaataattcacagtatttttagagatctctaatcattcaaaggttcctgtcttaggttgagttaaactttgcttcccaggacttgtcacctattagtcctggaatatctctcaggaacacacacaaaaaattttcttctggcagaattcaaattctattggtaactgtcatgtccaccctaatcttctgtgaggtgatccatccccagagcttcagtatttcatcctttgacttggatctcagacttgtcacctctctggcacccttgcttaggaagatgctacaccatccttctaggaaggatgccaacaggtggaataatgcacacagcaggtgtctgactggaagaggaggcatcattcacttggatgtttaggtctttagtgcagttatgtcctgcctaactgttctgggatgaattgtggccccccctccaaaattcatatgctaaatccttatccccctagtgcctcaggatgacactatatttagagacattattgttttgttttgttttttctctgagacggagtcttactctgtcacccaggctggagtgcagtggtgcgacctcagctcactgcaacctccgcctcccagattcaagcaattctcctacctcagcctcccaagtagctgggattacagatgcgcaccaccacacccagctaatttttgcatttttagtagagacaggattttaccatattggccaggctggtctcaaactcctgacctcgttgtctgcctgcctcggcctcgcaaagtgctgggattacaagtgttagccaccgaagcccagcctagagatagaatttttctaatttttaatttttgagagtgcgtagtaggtgtatgtatttctggggtacatgagatatattgatacaggcatgcaatgcataacaatgataataaccataataatcataatcttaagtggggtatctactgcctcaagcatttagcctttgtgttacaaagaatccaattatattctcttagttattttaaatataaaattaaattattggctgtagtcaccctgttgtactatcacatagtaggtcttattcattctattttttgtgcccattaatcatccccaaccccttccacaccctcacttcccttcccagcttctggtaaccatctttctgttctctattgttttaatttttagctcccaaaaataagtgagagcatgtgaagttggtctttctgtctctgggctattttactgaacataatgacctccagttccatccatactgttgcaaatgatggtatctcattcttttttatggctgaacagtactccattgtgtatatgtaccacaatttctttttccattcatctgttgatggacactcagttgcttccaaatcttggctattgtgaatagtgcttcaataaacatgagagtgcagatatctcttcaatatactgagttcctttcttttgggtaaatacctagcagtgggatcgctagatcatatggtagctctagttttagtttttaaggaacctccaagctgttgcagagaaggtctttaaagagctgattaaattagacagttacagccaggcacggtgattcacgcctgtaatcccagcactttgggaggcagaggtgggcagatcatgaggtcaggagtttgagaccagcctggccaacatggtgaaaccctgtctctattaaaaatacaaaaattagctgggtatggtggcgggtgcccataatcccagctacttgggaggctgaggcaggagaatcgtttgaacccaggaggtggaggttgcagtgagccaagatcgtgccactacactccagcctaggcaacagggcaagactccacctcaaaaaaaaaaaaaattagacagggtgggctttaattcaatctgactggtgtccttatgagaagaagaaatttggacagagagagagacagcagggacgtgtggcacagaagaaagaccacgtgaggacacagaagttggccatctgcaagccaaggagagaggcctcaggagaaaacaaacctgccagcacctcaatcttcaacttctctagcccccagaactgtgagaaaatacatttctgttgtttaggacactcagggtatggtaatttgttatggcagcccctcataaatgaatacactacctacatgtgtaactcacttctattacctacacagcaccgacagcattgaagttgccaatttctggtcaagagatgagtgacaagataccttctggaataaatctcagagccagttctgctccctttctgagcttccaaagaatgacatgcagccccatcagcatttccatcccagcactgcccgtcaccctaagaaacacttatttctctgttgaagcgaaagacccttccctgatacaggccagaattttccgaagtaaggtctttgtttttaatgaaacataaaaggacaggaagaatatcaaatcataaggcagacgagtcactgctaagtcctttaaattatcatacttgttcttataccacccatttagcctaatggagaacagagggcatgccctattgtctcctgcatggactcagttacgagctgctctccaacatatggagagaggcccttccagatactgcaagacatggagagaggctcttccagatactgcaagacacaagcacacctacttggagtgtcccttttgtccttgctttgccctttgaacttgatgcatagcaatattttcctagtaacaaacttggttcccctcccacctcccaacttccctgaagtgtcacaggtaaaatactctctcttcctcgacctagttctagaagcctccaatatcctgcactatccttacccctggtttatcctcatcttagggaactgaatgctactacaaagtagatccccttttaaaatgacataagcactttggtcttctccccagggttctgctatttcagggagacaagcagaggtcacaaagcatctctagaagtaaaatgccatccaggggttctgggccaccaacagagctgctaagtgctacttcctttgtcctgggcatccgatagcctaaggcaaggtacagatccctaggggctgaagacagagtgaatcaaatctgatccaaacgcctaggagcagcaagagctaagttgagaaaacctccagtaaatgccaaatctgagaccaagaggagaactgaaatcagggccacggctagagggaataagtgaaatggaacaacagggaggcagcgatggaatgggacagtctacagacacgggtcaggaagaaacagagtcaggcttctcagagtcaattctttatgcatcaccccttggagtccatcacccagaaagaaggctgtgcatcttcaagtcagggcaggaaaagaggagagtgggcagtcatccatctacctcctctcagctgcctgcccagaggtacaagctttgaatttcctctcctaaccatgagatctatcttgtcactaggattttctgttctttccacaatttattccaccttgtgaatgattggaacaaatctttaaaagggcatttttcaaagccatgatggtacagtagtcacactgtctggccctgacagctctgaacaagtcacaagcccccaaattacacggaacagctgtccatcaagtattgccatagtctactggctgcttgtgagatacagttaagtcatgcacacaggccacccaccaacaagcaattgtgattggaagtgcttcggctttcatcaccaacttcggcagcagagaatatggcatcacgccacaaatggcagcttccagaaacaaatcagatgtatcacgtagcacttcattctcctaccttcaatggccatgcatcctgcaaactggctccaaaagactccagggcagttagatcggggtatcacttgtatatggccgtacagtctacggtaatttgtattattgttcaaaatactactgaccaagttttctatctgcccctgccattgatattagtcttagccatgtaatttggagtgtttctccttggaggaagattatatatcccagaccctgtggtcaaaggcttggccttatgatttctggcatccttcctaatggaagaacatataccctcactttgctgagcttaagagtggctacgtaatttgctttggtccattaaatgcagacagtcatgtgtcatttccagtttaaaatccagctcatagttttctgtcagtttttgctctgttccacagaccacctatttccgagatagaggctgttgtatcagcctaagtaccagattagaggccatgtaaggtatggccacagccaacctgatatgcagcatagatgaaaaatgaacttttgtggttgtagtttactgaatggggaacatttattttcagaggttatttattattgaagcataatctagcctatcctaactaaaatatcttcttcctttttctctttttttcttccactaattaagcacctactaaaaattgagaatgctttataaattgagcacctactatgtgacaggtactggattgggcagggaatgcaaataaaagacatacctaatgggaagacccagatgttgcacaaatacattttgatacattgtggcaagttttacaacaagatgcatcagcagcttgaaggaagccattgctctgtcttctctatcaggagttgtggagggcttcatagaaatacccgtcatatatgatgctccaaaaataaataaggttgattgaatgactttgatattggggctaactttaagaaaaagatcaggggtttggttggcaaggaagaaagaaaatggcattccagtagcccaaaagggggaaagggcatttcagaacaaaaaaaaaaaaaaatggcataagccatgttgtgaatatacctctgttgttcagtgaggatggaacttaggatggacagatgaagagttagataaaatgatttcagataattccactggaatcaggttgagaataccgaaaggccattccaaggaggtttgacttagccttgggggttatggaggaacaaatggagacatctaaagcaggggaatgaggtggtcttcctgccacaggaggtggtgtggagcaagggatgtggctgggtttgggaatcacaaaaaatggagttcactctgggtaacatgagattacaacatttagaacagcaaatctccagtggagaaagggaaaagcacaaacccaccttagatcagcttccctaagcaacagactctgaaaaggagatgagatgcaagaaggaggtttactgaggagagctcctgagaccatcacctggaaaggagtgaaggatgcaggatggagcagaggaagaagtccagctgtgatgcagttgcaacatagtccatggctgatcacctagggagctctaaactttggatggcccatcagagttgtcttgaactgaggcaagagtatcagaccctcatactctcacatcaaccaggctttggatatgggttacccccaggaaagaggtgtaatcttgggcaagggacctcctttccacagaaggacgttaccaggacaagattctgctaagctgtcggtggcagtacacactcttagcagctggggcagtgagtgcctgggtgctgaacagggaatcagaatcttagaggcagctgttggcatccactacacaccctcacacggaacaacaacttgccttccaccaagtgaagacacagcaacaaggcaacatctttgaggcagagagcaagccctcaccagatactgaatctgctggaaccttgatcttggatttcccagcctccagaactgtaagcaatacaattgcattgcttaaaaattacccagtctaaggtatttcgttatagaatgctgaagggactaagacactggcacaacactttccagtacgttctatttttacagacaagaacatggaggttcagtgaggttacattatctgcccaagtgaccatggaatcagactgaaatttaactttagcagtgtctgactcagagcctacattctccccatacattttggtatttatcttcaaaaggtatgaatatctctatacaggggccacaccacagggaagaccaaccaaaaggacaatataagggactgtctctgaagaggaagacctccaatgccctttcatgggttctcaaaaacacctggggtctgagtctgatcagtactttgaaatcctgctgctcaggggtttctgcattaggtaactgtactccccaaccacaaagcctctccatgaccttcttccctgccccagtcaaggcagaacttggcttggaagggagctcagtgaagactgggcaataggtgacctgagatttggggcagaacggccagaaatcatcacaggcaccacgcatgactatgagtaccaggcactatcacccataccaccccattatcactcccattttacacttaagaaaactaaagcacagaaacctgagtcccttgtctgaggcacataacatgtatgcagctgatccagaattttgttctttcttcctggacctgcatcaacacagagtgaaacaaaatttaaacatcagttcctcaggtgcactgtctacatttcaagtgctcagtggtcacatgtggccagtggctatagtgggtaacatattgagtaggtcaggtctaagaatatttccaccattgcacaaaattctattgaatagtgctgataagggctgctttgaggtcctgggggagcaaaagagcctcggtgattatctaaattttctctatgcccctcacccactgtcccaaatcttttcattaaaaaaaaaaaaaaaaaacagtggcaaataaacctaattaatctgaggggggaaatatatataattaatccagaagggagaagggaaaccatttttgtacctgtttatgttcacttgataaacagaggaaagctaatgcctctgtagttccagaagagtccacaggggaattggaatctcttatcttagccccccgcagagcgtcaggcctgagatcaaagcagatctgtgcatgtcattactgcatatcctccccttccctcctacattttcaagtcttcttggttcagaagaatggcctacattagcctgcccgtaaaaagtgaagcctttatttcacaacaatactaataagtaaaagcaaaatagcagcagctagatgtccagctccctttccagacacctcccagatataaacgcatgatgtgcgatacagaattgcagaggtcttggcggttctctggtccaaatttccatctataaaatttatgccaagccattgtgtccttaaacttgaattaatttgaatgtctctagcagtgtgtgtgtctgtgtggtgtgtgcggtacctgagacctcccaaagaagacaactctattttgatacctacaaatgtcacaatagaggacttttttggatacatcttttacgttgtatccaaatttgcctttttgtggccactgcccatttctcttggatccctctttggggacctaaagaacaagtccagggccacatgtcagtagatgtgaagacaagacttaggaccccttgagccttcctctctgggtctctctcctgatggtctcaaggtgtggctttaatacctctctccctggcagcttcctcccttcgtgtgttcagttgcacctgcccacctcctgttgagagatggacagccccacttgagtcccagcctgtaggggaatggaaacaaccctctccaccaccaggacccataagtgaaggcatttgggagctcacaccttcagaagctgccacaccaaactgccctgtcatccgcacagggactcccacccactgtgcatctgcttctggactccttcctggtttctcataataaagtccaggttgggaaggagcaatgttaattagttacaagttgaaagctattaccataataatgaaaagatgagtaaatgcacaatctccttctttcacagaggtatttacaaaagaaagattaataaggtaattttacctccaaatctgcaaggagctcagcagatgaagcacagagaagatgggaaggtggaggcagatgctaaggtcatcaggaaggagggagggtatccctgctctacagaaaaacactgagcgcagtgaccttaagtaactctcaaggtcatgcagcaagtggtggagctggaattgaaaccccggaacatccaaccccggccctagagctctcgctcctgaccaccctgctgcctctcaccgcactacgccttcaccttcataatcccaatattgggtagtgggtactggccccattttataaaggggaagactgaggctcagaagaataactcatttgccccagccacacagccagagaagctctaagagtctgggtccgggggcctctgccctggagctcatgctctttcctgactgtgtgttccattctagaagaaatctgtctttcctgacccacagaaagaaccatccaaggaagtcccagatgggggtacacaaaagtgatttcctcaggcagccaggtcacaatagcttctcagtacaagagcccagactttggcataaagttcaggaccaaaacgcacctagaaggaaagagggaaaccccctccctttgatgcatcttgtagaggcagggatggctgaaactaaccaggagctgagccctattcacgattgctactgctgttacctgcctggtatgtgttgtaggctggggaacacgggaatgcctggtgtggctactgcagaaaaagtcaggactctccaaactcctacagtcctccaagggcaaacgaaccttccaggaggtggaattaaataaagctgagagatgatgtcttcactaattaaaaaaaaaaaaattaaacagcctcaggattcagaaactgaaaggagagaaagccctaatcctaatattaggctggtgcaaaagtaattgcagtttttgccataaaaacagcaaaaactgcaattacttttgcaccaacctaatatttcaaaaccgtgaacacagatgttagaggcaaataaattcacagtagaatgaaaaagtccaaaaaacactaatgctccacctctcctgttgaccaaacccaaggaattccccacttcagcactccggaaccgggttttgtctgtgcttagctaggattacttgctggagaggggggtccctgtctgtccccacaacgcctgccttcacccctacctcaaccccacccccaccttttcctcagcatgtccaatctctacctatgcttcaacacttattagtaacaatgctgggattaggggactcacccactaattctacccacctccagtgcaatgtgtagaggagtcacagcagaataaacagagacaaaggaaaatacagcactacttcccggttggctgggcttgggcacccaactgcaactctgaaacctcagggaagtgagaacaggcccctcgtagtgccccagcccctcagcagtccagaccaaaggaggctggcccagcacaccaagccatgaacacacctgagggtctgcaagaacactcccgcctcgaaaccacccaggaagtggatccaggccttaccaagagcacttggatactttagagtgtctggaggtctgtgttttctcaactctctgtatcagaggtcagcaaaaggcttctgtaaaggaccagagagtaaatatttcagaatttgtgggccatacggtctctgcggcaactgctcaactctgctactacagcacaaaagacaataaaactttatttacaaaaacaggtggtaagttggacgtggtcagggtctggtccctgccacgctgtcattttctggcctctgttctagaggacaagagttctgtctgattcatccttgtttttgcctttcaacactgtgggtatttcataatcctttgcggaaggaagagaggaaatttgttttcaaaaaccagatgaacaaaggtaactactgagacctgatatgtcctaaggtatgcttggatgtcaaagctaaaagattaagtgcaaagaagttcccaacagtttaagaaaacagaatttggagtccactgagcaaggttaattactcttctgtgtcaatttttttccacacttacagcaagccacttagttgaggaaaattccagataaagcaccattattcaaaatgtacatggcatcaccataatgtccaagactgatttcatgctcctgtctggaagctgaggatggaaaggagtttgccctgaaccataaacatacactggataccatccctggaccagcaatcacacaccagtaacactcattcccctgggcaccagggagtctgtcccagcatcagtgaggggcccaaatctaaggacaaaggcaaatgcagctggagaaaaaactccttcttgaatgcttccttcagagtcagcaaagaaaaagcaacaagattatattttatgtattatgaaactgaatgagctggtcatgtaaatcacttgttgctttaaaaaaaattttgttttgctatgtattttcctcactgtgtatcctggtgtctcactgtgtatcactgccccagctggagtgcagtgcttattcacaagtgggatcatggcatactacaactttgaactcctgggcagaagtgatcctcttgctgcagactctaaagtagctgggactgcagatatgcaccactatgcccagctttatttttagattgccttcccaaaaaaggagaaaaatgcaacctggtccatattattcaattttgatgggaggaataactgtcctcaaatttgtcataaggttttgtaggatgtagggtggaggcagaagagaagaaagaaagagaaaatttaattttgtgtttaagaatttacaaaaaaaaaccccatgaattccaaagattaaattctacagctcacaatggaataaaatctgaagttagctatgaaaggttagatatttaaaaactcaatcccactcaaaaaccttaaaacaataggctaacctatttcattaaggaggaagtaaaatataattacagactaggtaggaagatggagaaaaaataccatttaagactttcaggttgcagttaaagctgtattcaaacaaaaatacatacctgacttttcctattaagttagaatgaaaatttaaaaaaatggtcaatcaacttataagtttaaaaaatacagaaatgcaggaaaatgaattaataaactgaaaagaatgtttaataaatctgaaattttctaagtgataggattgattcatataatagctggttcttttcaaaagaccataaaatacataaatctttggcaagagggaaaaacataaacatacaacattagaaattgactaggtgaattgccaaattcaattcttctttcattctgcaaatattcattgatcacctgtaaagtggcaaaaactggtgacacaacaatgaattaagcaaaatctttgctttagctccctgtaaaggagaaagataagtaattgcatttatggcgtgttatgaaacatatgcaaattttatgaaagactactatgtgaaactatgctaggaaactacatctcctagaaatgcactattttacaggaaaatataaaatcaaaactgatttgactacataaataaccgttattctaaaacttaaatatttatcaaatttgccttcaaaaactgtgcaatgacaggtggcttcgcaggctacttctgaaaagccttcagggaactgatgattctggtgcttcataaactgatctacagccaaagcaagagagagggatctcgtgcactttaagccaccagtaaaaccctactaccaagctaaagtgggacaaagcaaaggacaaaacagcttcactttgggatgttaaagctaaaattgaatacaagtctacagtcttatccagaattctgaaagtgaaaaagttctgaaacctgtttttttttgtttgtttttcataagtcatctggtggcaatggcctgtgctgtccacactcccctctcttccacataaccctcattgggtacacctatgacagaggcatacaggaacgtaaaatctccagcttccttgttccaatagagacagccctaaagagtcacctatactatttccagaactcccttgtgcaactgagctagagtcaccttctgtgggactctgcgtgatatcatacccttgttggtctccttctcttccatctgtttttcctgagaacacttctgaatcaaccattctcacatgaacccttgtctgggggtctgctgctgggaaacccatcgtaagacagtaaaaaaatctgacctaaactgcttctgtggctacacctgacctgagcctatttatagcattatttatctgacttagctttgcagtcatatgtttggctgcataaatattaacatgtttgattaaggagcacttcctcagactccactggggttgttacataacattcacaatatacgtatcatattacctccctaaaatctaataaaatacgaattacaaacacatttcgcccaaagggtttcagacaagggattaaggagctgtataaaatactagtagatcaaatctagcactatattaaaggaataaaaaccatagacaattaaagttaattacaacaatggtttaatatttagaaatttagtcatacaatttgtaaaaataataggtcaattgagtaaaaccacatgacaatctcaacattcgttcctgatataaaaataacctagaaatagcatgcgagttcctcaaaatgattaagaatatttatctgaaaaaacagtcatcatacttaataaaatttcaggagcattataattaaatcagaaaaaaggatatctgctatgattatttaacttcattctagaatttatagcacaagcaaagcaataaaaataaaagagctataagcatttaaaaagagaaaacagaagtatcattatgtgtagatgacattattgtctaccttcaaacccaagagcataactgaaaactgttggaaatgataaaagatttttagtataggagccagatataaaatatgtgcctaaaaccacatctatttatacgagcaatagccaattagaaaatataacggaaacatttaacccatatacaaaagaaatacagataaataaaaaataaacaagaaatatgcaagacctaaaaaaagaaaactcttaaactccactgaagggcataacacaagcgatttgagtaaatgccaggaggtatgttgtacttagataagagaaatcaacactgtgaaaatgcctgagatctctaacttaatctataaatccaacgcagagccaaccaaagttcaaacaagatttgaggggagcacctgacaaaattactctaaagtttttctgggagaataaaaatgcaaaaatgcctgggaaacttttgagattttagagtactggggaaataatcctctccaatatgaaaacatatcatagctacagtagtaaacaagatagcatcactgtatggatagacataaatgaaagctaattagaccccaaaatacatattattctggttgcatgtcctgtaagtagaaaacacatgaattattcagtaagaggtattaggacaactagctatcttcttgaaataaaatgataaaaaaaaaaccacaaaatctctatctcactccttacaccaaaataagggcctgatatggtaaagatttaaatttataaaaggaagagaggaaaggaagaagggagggaaggaaagaaaaccataaaagcaccagaaaaaaaagaaagtatattttatgagagtgaggaaggcctttctgatgatgccatgaagatgaaaaatcagtaacatactgataaatttcatcacataaaaatttaaaaacaaataaaaaacttattgtgaccaaaaataaaaacccaaaatcaagtaaaaagaaaaccaccacctgagaaaaaaactactgcaacataaatgataaagaaagaactaatagttctggtgtccaaagaccatttacaaataaaaaagaagaaaaccaggccgggtgcactggctcacacctgtaatcccagcacttcagtaggctaaggtgggcagatcacctgagctcaagagttctagaccagcctgggcagtatgacaaaaccctatctctacaaaaaacacaaaaattagccagctgcagtggcatgcgcctgtagacccagctactcaggaggctgaggcaggagaattgtttgagcctgggaggcagaggttgcaatgagccgagatagtaccgttgcactccagcctgggcaacagagcaagacctggtctcaaaaaaaaaggaataaagaagaagaaagaaggaagaaagagaagaagaaaaccacctaaaagaaaaatgtgcagagtataagcaactaaagcacaggaaggaaaatgaatgccaaacactaaataacacttgaaaatattttcttacctcactaataactgaatgctaatcaaaaaatgttttcatctatgcagtaagaagataaaaaagactgatgaaaaccagtgctgggaatggaagataaaaactacaactcttttagatagctgtttgtcaatatttagaattatgactatcaatcataaaatacctaaaagatatataactcacacagccaatatggttgccaacagagcagaactggggaggaaggacaaaattattcactatatatacttataaaacaataaatatttttaaaatacacgaaattataacagccaatacttactagctgcttggcatatgccagactccgtgttataaggcactttacctgcacatacccgcaccccctcacaacccattgttctactttccccagaatgacagagctccctcgctgtccttggtcctgaaagatgggaatacctgctaacacttcctcctcttgtcagaagaggaccaaagaggaagcgccggtttgtctcttctttccttgccaacccttccagaagaagcattgtgaataaaattgttgagagctagacctgcctgaggccatgtctgggtagccatggctgattttcctttgcttcaaaagctgtgtctccctgtgcccactcatgattcctgaggatacagtgggaattccctgcttcctgcttccactccattcctcattcaaagactgtctgttgggaaataattcgaacctggaacatttagcattcttttgcccagtgtttcccaaattgtggcaccccgaccagcagcatctgcatcacctgggagcgtgtgagaaatcaaattcttggatccaccccagacctactaaatcagaaactccatgcatagagcccagcaatctgtggtttaacaagccctgcatgtgattctaatatagctaaagtttgagaccgtctccaatcacttaccagtgaagaaaactaagactcggagagcttaaatgacttgcttcagacctgcagctagaatgtgccagggctgggatctgaactcagatctttctgtttggcaaaccatggtcatacacactgtgctatagtactttttaatgtattgcttgtgtggtataaattcagggaatacaaattttcttttaaaactacaaataatgttcttaaatgttgttataattagctttagcattggctttttaaaatttatgaaggtgacaacagagcagaaaattatgctaatcttatctcctttcatttaactccatctacatcacaggactcctgtgtgtggacaacagggacaagtccgccctgtctccccaaagccagcaacattgagttgtaggaaagtacctataagagccttgccagccttgggtgatggccataacgtgccacctacttcccttagatcatcgtacaagggctacctcttccaagaatcattttcggctggaaagtaaacctatccaacctatggtgagcaaatgtggtgtttactgtcatgccaaatattcttgttgtcatgccaacaagtgttggcaagctgcagtccacaggccaaatatggcccactagctttttttgtaaataaagttttattggaacatagctaagcttatttgtttatgtattatcaatggctgctttcatgctacactgggaaaattgagtacatgaggcagaaatatgtcccacaaggcctaaaatatttacaacctgtcactttacagataatgtttactgacccttggtctaaatggttgtcactcaaatcgaaagagaacagatttttgcatgcctgaactcaagttctaggactgacatgtaccagaatctgatgttcagaaagttctttaccctccctgagcctcaatttccccatttgtacaatagctgctccactgaactgtggtgatggttagatggaacaagacatgttaaaggcctggtgcacagcaggtgctcattacgggctattttcctcccttcacctacttaggtacagagattcctaaagaccagtggtgtcatagctccagcacatagtaggtacattgtttattcagggccaattccctttgtaaattcagaatgcagaggctctgcaaagcctgtaggctgcaatttaaaatgtctcatcgtccagtgatccaggcgataatttactaaccaggcagcacacttagacactatcatctcccaaagccaaacttgtcctgcccagagccaacagtcagctctggcttgaaaatgaaaaatgggctcctggggatagcagatcccggctgcaggagggaaagagaaaggggcaaaacggcaaaactctgttcccacagatctctgcctcaggaagagtccccccttggtgaccttagaatctttcacaagcagaggttttataactctcagctgcctcagaacagagagctcaatctgtctctcttcttggtcaagcacaagagcagccacacaaggaaagttgccttggacctgggtagtgagaagggcattcttccacccaccctcccacccgccatctctcctcccacccaccatctctcctcccacccaccatctctcctcccacctgccatctttccaatatttcctctatcccaagcgctaatggtttatgccactctctccttccaatttgagcttctggcatctcagatcatctcaactgtggttttgtgccacatctttgctattctcctcctattttgcctgtactccaaccatgttaccatccatatgtagaatcatcaattttcagtgccaagtatcctattgcccggtgtactgggcaatagcccatggtcacatgtggcccatctgaatcacagaaaggatacagacaacctgtaagcactggatgagataaacacattgtgcctctggcttccaggactctggtcttaatgaaaaggaagccttcttttgccaaagcgaggtgcaccagatgccaggaacctggtcccctgcaagttgaagtgctgattgcaaatacactgtatctggcaggggtgtgagaggctagcaaacgacgccctccctcagccctcagggaggcattgggaacatcctttgatgggttaattgtactgattaatttcagtacaaaaggtagaaaagtgaagagctccatatcctgagaaaaaaagaaagacaaaaagacaagagggtgaggaattagggcaagaaggaaagaaaaaaaaataagcaatagttagtattaacagattttattgtgtgctagatataagctaaataatttgtctgaattatcctgttcaatcctcataatctttgaggaagatttgaatgttgaccctgttttacaaatgaagaaatcaggtctcagagagcagaactcattttcctaaggttacacagcctacatgcagccaaccccgccttgagcctttctgcctctgagcttcacaatcctaacccgcttcattcctttgcacggaagtaggttaaagttcaaggacaggccaggaaacaggcacagagaccccaggccacagacttgcaaaattatccagtccagccttcctatttaacaaatgggtaaactgaggtctgaggcaagaatatgaccttttgagggtcacccagtgagtcatcagcctgaatactgtgaagaagatgattttttaataaagtgctttcacatcacaaggctgggaagtgggtaagaattctcagattcagcgcttctttctccttcctctgtctgcttatcccaccacagagaacagctgatatgcccaagtctggtctcttgtgatgctggcctaagggagtcccagggctcgttcaatggacagacacccaggagaagtgtctgcgagatggcatcattgtggttcaagtggtccaaggcagatggagcaggaccctggagagcagcaacaatccagccgccagcctgagaaaatgattaggctgaatttggagcacctgccagccttgggtcctggcaggagaccagaaaacaaatccaggaagcccagcagaagggcaaatccacaggtgggcaggggctgggagaagacagaaggcaagtctgaccagagggcagttgaccaggagtggccacctgcatacatggggcttagggcagcctggaaggctggtggtgatagtgtccgccagggagactggccagggaaggttacagtttccccctctccaggaagacttgcacagtggagagtgggctgcaaagctactaatcctttccaatgtgtcactcctgctgcgatcagtacattttaaggtcctcagaaacaaacttcataacgtactgaaaaggggactgaaagaggaacatttccctcttttcagaattgccaacacagatggcatggattcaagtccggcctcagcacctccctgccgcatgcccttgttactgaggcagccccttcaagcctgtgccactccacctgtaaaacggggacactgatagcacctacctcaaagcactgtcaggaggattaaatgcaccaaggtgtgtaagacgctcagcacagggttcttctcatcctaagtagtagacagccagtgtagtgcacggtgcagacaactcaataaaatattattgaacagattaaaactttcacacagaattcatttaacttgttaaagcaaggaagtgtgcagctgcagtgtaaaggctttttgcttttaactactcaaaatcaaattggtattccactctcctatccctgcactcaacgctaaggttatttggcaggtctggcatatgactacttaagatggggtaacagcctctaattaagccttaaaatgtcactgtaagacgggcaggcaggaaggaacatctcctcaggaaaacatttctgggccaggcttgggccaaagagctgtcaatcaagagattattatgtttcagagttttacacccaaacaaatgttgagatccaggagggaggatccttgaggataatttcttttagaaacagagcacccaagtccaaagggtagaggatttggcccagatcccctgagttagtagcattccttccataatacctcttctccctaaaattcctcccttcagttaatttcattagagctaactggtactgacacagcctccatgggcggatcagatacaataacccaatctttatttgtttattgagcaactactttgtgccaggcattggggcaaagcaccaagcaagacggacaagaactctaaactctaacttttttctttttctttttttcattttttttttttttttgagtcacagtctcgctctgtcacctaggctggagtccagcagtgttatctcagctcactcttatctcaacctcctgggctcaagtgatcctcctacctcagcctcccaagtagctaggactacaaggcatgcaccaccatgtccagctaatttttctattttttttttttttgtaaagacagggtctcactatgttgcccaggctggtctcaaactcccgggctcaatcaatcctcctgcctcagccccccaatgtgccagaattacaggtgtgagccaccacacctggacaatccctacccttttgagtttataatctcctgggagaagaaggacacgcataagaatacaaataatgattccaaacagcaattacagatgacaaaggtgaaaagggatgaaaggaggcaggggaaccgaatttagattccatagctaagaaatgtctactgagccaaaacttggaaactcacaaggactaagtcatgcagagttcaggaatgggcattccaaagagatggaagagtgaatgcaaaggccaagaaatgggctaacacaggggagggataagaggtgagtaggggtagaatcatgcagcatctcgcaggccacactaagattttattgcaagtgcaaaaggaagccagatgcagcagagagccatgagggtaacatgttctgtcttatgaattaagacaatcactgtagttggcaacgaaggcggccagcagtggtgggaactcagagagaggcactcagggacccagactaatgcagctgttacatcagtcccatccaaggcctaaaaaggctactgaggccaggcgcggtggctcgcacctgtaatcccagcactttgggaggctgaggcaggcggatcatgaggtcagatcgagaccatcctggctaacaccgtgaaaccctgtctctactaaaaatagaaaaaattagctgggtgtggtggagcgcgcctgtagtcccagctactaggggaggctgaggcaggagaatggcgtgaacccgggaggcggagcttgcagtgagcctgggtaacagagcgagtctctgtctcaaaaaaaaaaaaaatggttactgaaagcttccccgtgggctaagatggcttggacagcgggactgaggtcgggctgtggtgggggcatgcagttctccagtggcttcgcctcatctcaccaggaatctccctggacccaaggaaccagccatcccaacaccagcatcctgcacagttccgagactggccctagagacaccctgggtttcaatgaacacttgttcaactaaaatgaactcagtaggcaatccctcgagagatacaagctctgctattgatgaaggctcacagtgagacaaggataatgggttcaaatcttgttagcaaagtcagagaactgagaaatttctgagctccaaagaataatttcccttctgctttcaatatttttgcagggtgagaatctttcatagggcggccaggaataattcttcggcaattattcagcatctcttggactggttttgcttattttcatcaagttaaagatcattcacgccagtttcttttcaataccgccctcccttcccctccctcctccctcttcccctcagatctatgcctcataatctgttttccccgattcgccctctgcctttctcccccatcctcctccatgcctgatgcttctcatgtttcatctttcctgagaacccacagtgctgcgcttgagctcagcaactcccaacttttttatttgacgtcccagtgtgtctccagtcatctccaggggagttttgaaattcattttcattcactttaatttaaaaaagaaatataggccatttagttcttttaagagggggaaatggggtgtcactcaaccagcagggaggtgaatcctgacttcagctattagcttattgggcaaagtggctctcttccaagtgttcttggttcttgggtcgcttaagcaagtaaagtgttttgctaatgtctgagagacattcactcttggggggcaggaaaataaagttcagggagaaaagagacatgagaaaattaatgttttctattaactccatttccaataaagtaggaattcaacaaaataactcatatcactcatccatttagtcattatattcaacaacttatttagtatttaacattttccaggacctagtcatgctaatcatactaatgatgatgatgatgatgatgacaccgatgacaatgatgataacagcagctaacattttattcagcttactcactctgtgccaggtagagctctgcaataattacctcaattaatccccacagaactccataaaataggggttcttttgtccctactgcagaacagaggctgagaaaagttaaacaaattacccaaagtcacaccaatgtaagtggaatttgaactcaggactctctcatcaccaccatgacacactgcagccttgtctcagggttacaaaggcaaatgaggtacagccgtgcctcaaggatctcaccttagcagtgggcaaaacaggcaggtaatcaactgcatggatcatttggaaaagccatagaaaagaacatgggagtacaaaggtggggtctctgctcagcctggaagcagagaatgcataaagatccacttccagaaggaggtaaagaactcctgggagttggctgggcagagggggtggggtccaggagaaaagggcttccagagagatgaaaaagagaggaaggggtcgctcaggaggatggaccatgcctgagaaatgcagatatatggaagaggctggtgccaggggttggtggatagacagtccacgagccctggctggggagactgtcaggggtccagtggttattaagtccctttctggcaggctaactatgggtcctagggagccagggaagggggtgcacaacagggtggcacaaccagtcatggaatcttagacatggccccatggcaacccggatttggcaatatagagagaggttcagggggcccacctagaaagatgtttgatagacatctaagcaagcatgagcagatgtgggcttggccccaggcagtgggccaagggggtgggaaacagcagatatttgagagaggctaaggggagagaaatgatcgctgttggtggccctcatagagaagtctaagaatattggccattatttttctaaattctcctggggaaaaaatgtttctgcttttatttttctggcgatagtgaatttctaatgtatttttgccatctgctccacaacagagaggcaaataggattaacaaagtttatgacatggagagaagccctgtcctgtccttgggcctgtggggggagagaggtggctgaccaacagcagtcttcctgcaagtgaccctcacgaagacacctgctcgcctctgcccagccaccctccatcacaggtaacacatctgccctgctcttccccacaacacccttggcctgactcccaagagcagcaggggtgtcagatgaagcggtcaacacagataacctgacagctaaacaagagaacgaaatgaatattcagcagctggttctgcttcagaggctgttaccctgttctccatctctccttcaatcccaggaacagaagaaaagaacaccaatcacctctcagccccaccattctagatccaggtccatggtggtagagcagattgtggagattaacattcaaattcaaacagtcgcagcattctgtcagtgcttttaataagaaaaagtgtatatcctttggataaagcagacccaatttatatatctaatgtatgatctcttgaattcataaaaggccatgtaaaacatacatacatacatacatacatacatgcatacatacgtagacacacttactttgaaagctcaaaacacaaagccatctctctacttcaacatctgaaaaatactatcttgccaatgtatttcccaagaagaagacagtaaaaaggagtataaacaagaggaaaaaaagtataaaacctgattatcatcttcaatccaaacatctcagacacaggtagacccaaggctttggagaatccattccttgcatacaactcaattcctgctgagcctatgtgaccagacagacaagtgcagactggctttgtgtttaaaccctaaatgataccattaacatgaggctttcagttctcctgcccaagtatttcccggggaaatcactccgacaaataagctttcctgggggcaactggcatcctctttcagctctaaatatgctttagttaacagcatgaggcctgttcatccctgccctgctcatatatcctaaatgagataggagctagaagacctaggctcaaggacctgctgtgtcacaatttgactatagaaattagactaattatgggatctccctgagccagtggctatcagtaagaacaattgctaatatttcctgagctgctggggtactatcaactttatgttaagcattttacatggattatttcagccaatccttccagtgttttatggtgcccatttcaaagggaaggaagtggaggctgtcagtgggagtgctgggtggctgaccacaagcatcctcaacatggtctctgagctccagggcaccacacaggttaccaaggaagggaacatgcagcttgtagcaaggctggttcattcagcactcactatggtgcaggcactgcattgaccctgttggaaaacagggagagacaagagcatgggcactgcctggaaggagggctgtggcattgggacacacgactggtggtgatggtattgggctagttcacttggtttaggcagaatttcagctggacaagaagacgggaagggagctccagggagagggcactgcaaggacaaaggtctggccagcttagctactaaaggcccggattggtgctgagcaaggccacggccacccaggcagggcgttcacaggccatctaccaccagctctccctcatacggcgtctctgctcattgacagacccagccctgggccagtggctttctgctcataccacaaggtccaaatccgttacaggaaaccagtaatggcctaacctttgacactgggtaaacataagctctgatcctgggtctacctcttcacagatgaataattttgggcaggccacttcacttctctgagcctcatctgaaacatgggaatcatgtgactattataacccaaatgttggtgtgcatagcaaactttccattcacccctttcctgataacagaacctccctctctggtgggaaactcatcccatgggatacagatgggcctgatctctgtcctccattcccactggaaggagcacaggcctcaagcttgaccaatcaaagcatatcccatctcctgggtgcactgataggttctaagatgagaaagtgacccaacctccctcaatctgaatcctcccaaggcagttttttgaagctatcagaagaaagtggctctattctctggaatgacaaattgtacaagtgacacaaatctagagcatctgaatatatagaacattctagagaatgagctcaatagagagaaagcaaagtataatagaaccaagatatggagaggtggagagaggctgaaagcatgtttgcatgttctagcgaaagtctttgagttcttggatcaagctatacctgaaatctggaccactccttagacttcctacatatatgtgccaataatattgcccttcttttgctaactccagtttgaattgggtctcttgccacaaaggtcctgtctaaagcctggtaagtaagttagctacaaagattaaataagtcccagttaagtaaaactgaattgaatgcattctgtgcatttcaatcaatgctctttcccttcccttagttctaggtctcttgtcctaggcagatgtgaatctgtaataactacagaatatttgtagaaacttactgccataaaatgttcttaaacaaatctaaatcattcagttataagagtaagacacaaacatttggccaaatcatctatttaaaactctgctccaatccacccatttcaggaagctgccccagattttggtcacttatggtccttccagccacactctgtaactgtaaaaaaaaaaaaaaaaaaaaaaaatctacattattctatattattttataaatcaaattcctgtgtttcaaatgcaacttattgaaccgcagctgtatctctctaggaaaaaaatctcatcaaagacaatattttactcaaaaattcagcaagctttaaacaactaaaccgttaaaggaaaaaactatatagcgaggtagataagtaaaatcctatttcactaataacttttttcaccaaattgaaactatatgcctccaagggaaccaaaatgaaaacaattatcaaaaaaaattacttgaaaatgtagcaaattttaaaaagctaaacttttaaaggtaattttgattttatattttaaagaataaatgtgaatgaatgaaaaattcctggaactacttttgatacttgaactaatggtctcacggaaacaaaataataaaagatgagttggacacagcacatgtaatagaagaatcctgggctctcgtcatgggattcccaatgtccctgaagacagcccaggctttggcagcccagcttcccatactggcatgaggtaaaagcgattgcctttatagtggtagacttggcaggaaacacagcaacacaacaggggtaatgattcaaaattcagcataaatgaacaaagaaacatgtttactgaacccacctggctattgtgtaaaacaaaatatcacgtgctatctataataagccagttctctggactacaaaagcagttcacttactcaacagatgtttattggctatttggtgtgtgccatgtaccatgcaagggttgggaacacagcaaaaagctaggtgtggcccctgccctcagggagctttcaatcttgtttgtgcaacaaaaagtgtgcaaataattgcacaattctgaacttcaatgggtgtgtttacatttgaatctacaagtttattaatgctttgtgaaaaacttcatataggatgaggtcattctatttcccttttaaaaaaataggtttattaagatataattcagataccatatgattcaccagcttaaaatgtagaactcagtagtttctggcgtaatcacagatctatgcaaccattgccacagccaattatagagcattttcatcaccacaaaaagaaaccatatcctttactaagcatccttcaatctccccaaatgctcccagctttaagtaatcactaacacactttctatctccacagatttgtctcttctggcatttctttgctaagttcaacatagaattaccagataacctggcagttacattcttaggtatagaccccaaagatgtgaaaatgtaaagatgttcaaacaaaacactgtacctgaaacgttcatagcagcactgttcacaataggcaaaggtggatatggcatatccatatgatggaatatgcctcagacataaaaaaaaaaaggagtgaagtactaacacaggctacaacacgggtgagccttgaaaatatgctaattgaaagaaactagccccaaaacacgtatgacttaattccatttatatgtattcccttggcctgaaagttctcttcttgtgttccttctctctcttccccatcactcacccatcctctgtgatctcacatccaccccctccactctgtccccagatccactgttctggatgccagcatcagtgctcatatctggatcatggcggctgactcctctttggtcccttgcccctgggctttcccctccaacctaccccatgcaccagctacccgggtggtttctctaaacacaaatctggcagagctgattacaacccatgagtggcagctccatccaccatcatccactgaattaaagcaatccccatcacacacaaactcccaggtaccagcacccatcattcatataacagacatggagccatccagcatgatgaagttccctggatcctgcactcttcactacccacttctgttcctgcctctgtttgtgctccgcctggattcctgcctttgtctttcctacctagaaatactgctctgtcttccagacagttcactccttctccaatactgagctggccaccaccctggcgattgctctccacagtgtttgaggactgtttaattaactactgctaaaaaccaggagctgtatctgctcaccgctataaccccatgaactagcaccaagcctgccttgcacattttcccaatgaaaatgagggagaaaggaacagaagaaatggaggaagaagttaatacatatttctaagaaattaatacatatttctcaataacttaggcacctatttatcaaccaacaaataactattgtctcagatattgaaaacatcttggcctccttaagctttttttcctcagactcgcctagtctcataagggacaaaatcaaactccagagttgaaaacaatagcaacaatagagaaaccacaagaagcctcagctcaagtcccaaaccagggtaagaataggaagtcctgccttcctggagtcttgttcattttagaagcttcacctccaatctacttgagaaacaaaatagggactggtagagaagagttaatagaagcatcaaaatggagacattacaaaggttttaggaccttgatcttaaaaccttggttcccagccaggcacaatggctcacacctgtaatcccagcactttcggaggctgaggtgggcagatggcttgaatccaggagttcaagaccagcctgggcaacacggcgaaacttcgtctctacaaaaaatacaaaaattagccaggcatggtggcatctgcatatagtcccaggtacttgggaggctgaggttggaggatggtttgagcccagaacgtcaaggcggcagtgggccaagattgtaccactatacttcagtctgtacaacagagtgaaaccctgtctccaaaaaaagaaggggaaaaaaaaaaaaaaaaacaaccttggtccctgatctctacctcccaaatctgagcttttaggctttttccttcatttctattttctggaatcctgaacacactgatcttttctttctgatctcttgtttggagaagctcttgtggactctgtagtccctgacagcacctcttttcaggtaagacacataaaggcaaaatcatagataatccatttgcctccagtgggggtggggggagcagcaaagacagcaggaaggtttacagatttttctaaagacccatctagttctaactctctatgatacttggtagaggacaaaatagcatgaaataatagcaatatgcgtgagcccaatcaaagaatttattttcaaagataaaaatgcaaaggtgttgttcatgatgattgaaagcaaaaaataataaatagtgacatttgagattggtcttgatcactcctgatttctaaaatctccccatcaccctaccattacaatttcccactaattactacaagcaattttattaatatacttttcagcctcattaaatattaccttgggcctaacattaaaaatgatgaggctcagtaatcttaatgagcatccaagttgcaccgacccctgaaaacccagaaaacagagaactaaattcattgctgaactactctggtccccaggcatgcaggaatcaacttcagaaacatgaaagaaatgatacgtacaacccagaatgaagcctgattggaagcacataagtttagcttggcctccttcagttcctgtcaactaagggggcaggaaaacgtcgaggaaacatctgggctttatcttctcctcccctttcaccctggttataaacagcatccatcagcatgctgttcaccaatattaagtctttcctgggactctgacaggtagagcttctagtgattgtgggctgggccaagacaaagcaaactggaaatgaggtatccactgctctagcaaacagaaatctgtggctttctctgaaacggtagtggaagcacaaagaatagacagttgagggaattaggaagataaattttatttgttttcttcctagcatgaccagaattgtctgcattcctcaaacagcaagctaggcaagacagtgagaccagcttcctggttctcaaagtaaattatttatcaggagctgaatttactgctttcctgactaaactgtcaaaaccctgccatttacaatagcagttgtactgtgtgatccccaagatgcttaggtttcccctagcttctaggttaaaaatgaatgggtaacagtaaaccaggggatcagctgaagagaccagcccagacttactgaatccacctttggccaagatctgagagagttctccatgtgtccgaaaccagtaaacttagcacaatgtaaaactattatattagacagaaatctttggaattatctaatttaaaccactaattacctaaaagaaaactgaagtccacagagaggaaatgatttgtcttggatgaacaagaagagtcaaatccaaaacctgaactcttgggtcccattcattatactaccatggatattgtcaacctgaaatgggggctgtaatgggaatggaggcagagacaaccatccaccaaagaattgtggtgtccctctttcatggcacagtgctggctctgggacgtggctacctaccaggaactacatcttcgcatccttccacccactctcatcccactaccttgcagctgagtccagccacaggaatgcatcctagccaatgaaatgggtatgaaagtgctgtatgatgccacttctgggcgtgacccatgcaaacctcaaatccagagcttctccttgccttgccctatctaatggctgggtacagggaagtttaagatcataggagatagtgaacctagatcttcaaatcacctgagggaacaaagtcttttaagatgaggcatacacacacggtctgttgctgaagcaagatataaaattttattgcgtgaatctattaaaatttttctgggggggtgttattcattacagcacctgctattaacctaacaaataccaggaacaactttatagtggaaaagatctcagacacattgagcccaaagcaaaactgaaagcccataaaaagaaccttgttataacagtgggaaaacattaacaaatcaaataataaaaatgataatttatcaatttgccaacttgctcagcagactcaaacggattaattgttccaggtttctgagggggaacaaaacccaagtaaaggctagtcttgaaaacaaagtatttttgcaaaggaaatttttcctcaagcgtccttattcctgcttccttttatcttaaaagtgatggcaaatgaactatcgatgcatgcaacaaccttgatgaatctccagggcattgtgctgagggaaaaaaggccaatctcaagggcctttctactgtctgattctacttatataacattcttgacatgacaaaattgtagtgatagaaaacagatcagtagttgccaggggcttgggtggggaagagtgtgtctcttaaacagtaacacaggagagtttctttgtggtcatgggtcagttctgcctcctgactgtggggatagtcacttgaatctacacacatgatgaaagttcatgggggttgggagggtggggaatgaaggaaggaggaagggggggaaggggaggggaggggggaaggaatggaggaggaggggggaaggggagaaggaggggaggggagaaaggaaggaagggcagggaggtagggaaggaagggaaggaaaggaggaaaagaaggaaggagggaaggaggggaggggaagagaggggaggaaggaaaaggagggttgaaaggaaaggaaaaaggaaaagggaatgaaagggaagaaaaaaactaaaaaagaaagtgcatgtgaaaactagtgaagtccaaataaggtagatctctaagttaacaatttcctggttttgacaatattactatgattatgtaaaatattacctttagagaaagctgggtgaatggtacaaggaactctgtactatgtttgcaacttcttgtacatctgaaagtatttcaaaataaaaacttagaattctttaaagtgatggcaaaggccctggaccaccaggttctgagttgggaaatatgccttgtacttccagattgggcaacatgaatatgataactgcagagagttcaggggctactcacaggacctttgccattagtcacatgattatttgtttattctttgtcttccttctagactataaatgcctggaggtcaggagccaagtcagttttgttcccccactcaatgcctaacccagtgcttagtacatagaaagcacccagtatatatgtgtgagatgaacaaaaaaacaagaaggggaacaggcaaggaaggaagtatcactcacgctttacagaggcagtggtgtgcagaggtttccatgccttgcccttgtgcacacagctggagagaagcaggacaggtacaaaaaccatcagggcttccagagtgcccagtgaccttttcttagtgccatatgcctctcaacttagatccctggtagttgctttatcttacataataaaaaaagtaagaggggaggaaaaaaagagcagacacagagagagaaatgagacagagagacaaagagatatgaggaaagtagtgagagagatcgggtgaaagagggcaagaaagagggaggaagagaaagtgagtggggagagagaacaatgaagagagagagggaaggagagaagagagaaagagagccagagaaagaaagaaggagagaggaagagagagagagaaaagaggatggaaggaaaggagagagggaaggcaagagaaaatctgccccaacatggaaaatgacattgaacaaatggattccaaattttaacacggccccacaccataggcccaggcctctgtaactgctctaattgctcagaaatggtattgtaatgtgaacaatatgtcattaagcaataaacgcttcatgcaaaataacaaagtggtcatcagtgagatggaaaccaggaataaccaagggaaattgtgctccacatctctccatgctccaattatcagactgatcagtggctccttttgtctgttcagaaggtgctgcagttttcagtacaacataatataatgtgaaatgcaatacaccaagactaagaaaaccttatttttttttcagtcttacagagagagcaacagattcaaatttgaattcaggctctgctatcttctttgcagccactgcggcccaagctgcactggggcccactggagaccacctcgggtgaccaatgagtatagcatcagagtgtggggagcagagtcttcaatgtgaggtggcgccaggtagggcatgtcaaggtcctgcagccactgggagctcttcctttgaaaccagtctgcaccctgcacctagcccttgcactctgagcctatgatggcaggggcaggtctgacgatctcagaatcaactttagggtcattcttccactgtcttggagaatagctcctggcttccgttaagactgctgattcatactaatctccttatcaaacagttgcttggacatagccttaatgttctttttttcaatatgtataggctgagaatttttcaaatctctaagttttgattcctttttgcttaacaatttcatttttgagtcatttctctcttccttgcattttactctgagcagtgaggaggagccaaggcataccttcaacattttgcttagaaagagcttcagctaaatatccaattttatcattcacaagttttaccttccacaaaacactagaacatgaagacaattcattcagctaaaagctttgccgcttgataagagattgtcttttctccattgcccaataacgtggctctcatctccaactgagacctcagcagaatggcctttaccatccgtatttctaccaacattctactcagcattacttaggtattctctcaggaggtggaggctttctcttgagctttcttcctcttctgagccctcaccagaatcacctttaaaggtctgttcaacagccaggcccagtgactcatgcctgtaatcccagcattttgggagactgaggtgggcagatcaactgatgtcaggagttcaagaccagcctggccaacatggtgaaaccctgcctctactaaaaatacaaaaattacctgggcatggtggtacacgtctataatcccagctactcaggaggctgagtcatgagaactgcttgaacccaggagggggaagttgcagtgagctgagattgtgccattgtactccagcctgggagtgcaatgtattctgagacagagtgagactttgtctaaaaaaaaaaaaatacattattttatttttgttattattatgtctgttcaaggcagtgtaggctttttctagcacgtacctcaaaactcttccagcctcattatccagttccaaagcctgttccacattttcaggtgtttggcacaggagcacccccatttctcggtaccaatttttatcttagtccatttgagctgctgtgacagaacaccatagactaagtgacttatcaacaacataaatttatttctcactgttctggagcctgggaagtccaaattcaaggctacaagaagttctgtgtctggtgaggacctgcgtcctggaacatggatggtcttcctcttgctgtttcctcacatggtgtgagggacaagggggctttctgaagtcccttttataagagcactgatttataagagctttctttcctggcctaatcatctcccaaaggccccacctccaagtaacacacatcaggggttagatgtcaataaacaaattgtatgggaacataaacattcagtctatagcagtcacttttcatctatgtgactatgagcaagttaatatttttaattcggctttattatctgcaatacaggcacaacaatacatactttgcatggttattgtgaagattgaatgaaataatttatacaaatgtggctactagcacagtgcccaccatgcatttagcactaaacaaggacctctgtgttctcttccagagagctcttcatccagaagctcaacacaaaatgttgcacactgtaggaccattcatatgacgttctacaatcaataaaatgtgcctagtaagaattagacttgtttgggaggaggagaactaaagggcacaagggtactttctggggtgacaggttgtgtattttggtaagattataggtgttacaggagtgcatgcattagccaaaactttctaacccatatatttaagatctacatactttacagtatttaaattatacctcaataaaaaatttaaaatagatagctagatatctagatagccagatctgtaggtaggtgggtaagtaggagggtgggtgagtggatgggcggataaatgaatggatggatggatggatggatggatggatggatggtcagtcagggtacctacttcagcatgaggctcacaataagcattccacaagtatttctgaagttccagaatcaaaattaattcctcttaactcctttccgtcactactctcgctcctccagaaacaatctactcaactgtagggtggcacagccagttctaaaagtgcttccttctatgtgcctgaatcctggtccctgatactccgactcaagaggccaggtggatgacatctgcccactgcctccttataacagaactcaacggtcttgagtatcaaatgtgctcggcctcatgttgagcacctttaagtccttcactgtactagtcaccttcaattcttcaaaatctccttggaccgtgagcccagatgggcctctagatgtcatcttttaagtatgtgtcctcaacgaatgggctctgggcagctctactgctatgaagtggtgtccaccatctggagctcatgcctgtggtttggtgcatagtaattgccaatatctactgagcacttactccatgtctagcactgttctagatacaacatgttttcactcctttagcctccacaataaatcaaagaagtctatgtccttcccattttacagatctgatccaacagaatttcaaggtaactctttatctcagggtcttttcagaccccattaaatcccatctgcaaatctcatctccacacctttatcccacccatcgttataatcgaattgctgtgactcaggcagaacaactcttgcctaacatacaaagcaggagttcaatttaaaacatgacagtggagttttgaaggaacaattgactgatacaacaatgggtgaagcttaaaaacattacgctgagcaaaagcagatgaacacaaaacagtacatactgcatgtttccatttctagaaaagatcaatctaatctatagtgaccaaaatcaggtcactggttgcctggggcttagggtggaaggaaggactgcaaagaggaaggagagccatttctaggtaatgaaaatgttctatgccttgatcagggtggtgattagctgggtatgcacattggtcaaaaccaaaactctgcacttaaaatgtgtacattttattggatgtgactaaagctgatatgtttatgcaaaaacaaagaaaagccttctgagccaacagctctagctttcaatctcgctttgtcttttcctggctgggtaacctagggcaagccacttaacagatctgagccttagtttcaggctgttgtcagggttggagataatacatgccaaacacctgggggaaaaccaggctttcaataaatcgcagcttctgttattactgttaattaataataatgagaaataataatctgagtaacagcttcaattctctacttcacttcgctgggagatcttgaactgctaaatgttccttactattagctctccctgaaaaccaacacacactcttttgcagcatgcaatcacgttaacgctatgctagaagaataatcaagaatgaataccaaatgtatgtagatgaaagaattcatgtttatatatgaatatgggccatgaaatcttggattaattcaaacctgaacatggttgacagttactattttctttccaaggaatcagattttctgcctaggtaactccatgggagttttctactatattgttacacagggtgtaatttctctaataaggtcattgaggggaaaagaatcctggactctctaatccctttgtattactttttcctaagagtgtctttctcaagggatatgacatggggtcagcatggcaaatttcaaatgtatagcaatctggtttgggtcgttttcaagctaaaatctgtgagctcatctctttgttttttggtcacttacctccacactcagaaaattgctttgtggaaaactgttcagctctatttaggcttataaataatttatccaaagctcaagcaaaggtgaattagaaattttcagggttcttggtggaactaagactcagtgtgaggtcacaaaagattaaacaataatggcaaatcgtatgtgaaaatgaatgaaagggactaggtagaagtggcctcaaagttgcaaacatgttagtcaacccatctttcagtaaattcctccaaccatccttcatttggggaacatccttgttccactgttagtcatccaaagagccaacttcgggatgtgagggcaatctggctgcgacatctgtcatcccattgattgccaggattgattcagctgatctggctggctaggtgggtgtccccttcctccatcaccactccatgtgatgtgcgtccctcctgaagctgcgcagtgggtcaaagaggatgaccatccccgagagagtaggaccagtcttcagtaaagggtataccaatatctgcgctcccctgatagaacctccaaacaaagagccaacttctcctgctaaatgccatgctggtggcattccagtgtgctctcggtcttagcacagatcaactcagtgtcatgagtcatctcccttttggaagaaattcctaaatgttctggcttcatagtgagtgctggagaattgagagccttctaaagacttaaggaagctccaaagaaaagaggaaacagtcattgcctagacaggaaccactgaaatacagctcctcaacccaaaaagcagctctgcaagttcccaggtgttaggctccattctgagttcacatgaaaccaagttcatcagttgatggactcaacatgagttcagaggtctcagagagtaaaaactagcttccagtcctacttggactcctcaggaaataaaatttgctaatagcatggtacgtttatgatttgactttccttatatttacccgtggactttccatgagacccaaacaacttttcttaaaaaaaaaaaagttcccttctatggcacagactactacctattcatcctacccaatttcctcttcttcttgggaacagagtgagaccacatttcccaggatcccttgcagttaattcctaaatttacaactgaattctagcagatgaaaggtagactttatatgataatggcaattcttaggcctggtccatgaaaacctcctaccccatcctccaccctctagtttcccatcaccagttgaatttcacagacctataggaagacagagccacaagatgggaaatctttagtcctgaatgactgaagagtatagtcctctgccagtcacactggagtgatggagaaaacaaatctttattatattaagacaatgaaatgttgaggttgttataagagttagcctgtcttgactcgcataccctcctctatggtcatcctctcaaaaactccattaaatgatttcaaattaaaaaacaacaacaaaagaacgttaacacctagcttatgcaagacaaatacttttagatcaaatctcacaagtcagcctgactgcttcagtcacagctgcttcaagttgtgaactgcctgtgggtgtcctcatcccctcctctcaacaaacatcaagttcaaagaagtcttctggaagtcaagagctgacaggagctggctgatgtcaaggaggaagcccacatgtctcaagccacctctggtaacacttcaattatccaccacctgcttatcatgaggttctgagtacagctttttccactgtctcccaaagaaaaggttaatggaaagtgtcaagatccaacaggccgataaatcccaacccttggttgagaaaacagagcttatttctagacttagtcatgattctggatgctagcttatattaccctgacccctcctgtctttacatttgccctttcctctgttgtggacatggcttgccctcatcggtgatgatgatccttctatccatggtcaaaacttcctctcttccaacccacactcttaaagggtcatgctctaaactgaaggaaactccaaaagaagaaaccatctccttcccctttgcatctcctgccccaagcacacaagaggtgcactcatcagcacaggataactgctacagcaaaaatcttgatattttggtggcttaaaacaatgaacgttttctctgcgttcatgccacagtccaatatagattcacagatctaggatcctataattccaccaaactctgtggcatcagagtcttccgtagtcaagggaggagaatgcaaatcacatgtagtaaggatttacaagagccaggcctgaaagtggtatttgtacataactttcactcacatttcactggccagaactcaaaataggcccatacctaatgacaaaagggcctagtaaagtattctcactagagcttaaaaggaaagaggaaatggattttggtgacctctccactgtatgtgacccagtgggggagggagtgtctcacagaaggcagttagccagcttgtaaggacatgacccagagatctgttggtaggaaaatgaaatttcccagaactatgcaaaggagatctgctaccttagcacaatgaatcagatgatgtacaccagccagaggttcaggtaaggtgggacctcacatgaggtgagagcaagttatctgaaaggagaggctcacatgtacatgaaagagaccaggaaaggtctaagagggaagacaaggtgatgttgcctcatagattcacgctggttgaaccaggctgacttctggtttcctacagagtcaaagagctcagagtaggcagacctctcattttacagttggggaaaaaaaggtgtccatagagttaaagcaatttgcaagttgcacatctagcaagcaagagaaccaggactggaactcctgtccctgactctatcactcccagtccaccttgtcagctctgtatatacccctatatctgcaaaagtctaggccttaaaaaaaatagctaccagccagtttattctctcagacaaaagatttccagaaaccatgtcttccaccctggtattttgctcttcccaactctctctctctctccttccaaatttacataaactatacacgtggcaggtgcctgtatgaggtacaaggacaaaggctctcacacacccaccagtctgtgtcacccagatggcttcctgctcatgcaagaaggacttggctcggttttcatccataaatgtgtcttcatttgtccccggaggcctttctgtcacctacgggagcacttctctgcaagctctgtgaattataatcttctagagggtatgttccagacaatgaacttctttccttccgtcttttaaaatgagattaacccaagaacattgcagaggctcccagtgataagcatttctcagactccctaacactggtgcaggaataagtcggtatgcttttctgaatctgagaaagcctagaaacccaggcctcatctgaagaagtacgagagacaaacagttatttctggctacattcctgtgtattccaaccgaattgcacttccccccatccacccattctcccttgttctccacacctacctcaccttaggtcacctctaccctgttccaacctgaactgtggggcatagcacggagtggtggaagggtagggaaggtggcaccatcaaggcaaactctgaattcctgggagagtggcttcatctttgttctacagcagggctcagcaaacttgatgggtcaaatctaacccaccctctcttttcgtaaatgaggttttgttggaacacagcccacagccaagctcagttgttcacatattttctctggcactttttgtgctacaatggcagagttgattaattatgacagagaccctgtggcccacaaagcctaaaatatttgctctctggccctttatagaaatgtttgctgagccctgttctgcaggaataaagaaccagttttctttcaaacaaatattcatagcagcattatttgctatagccaaaaggtggaaacagcccaaatgtgggtcaatgggtgaatgaattgtggcatagccatatgaaatattcttctgccataaaaaggaagtaccgacacatgctacagtatggatgagccttgaaaattatgctaagtgagagaagccagacacacaaaaatcacattttgtataatttaatgtatatgaaatatccagaataggtaaatccatagagacagaacgcagacgggtggttgccagggaatggggagtgggggttggagagtgactgtttaatgggtacaggatttccttttagggtaataaaaggttttggaactgtatcaaggtggtacttatagaacattgtgaatgcaccaaatgccactaaattgctcactttaagatggttattttatattatgtgaatttaacctcaatacattttttaactcaaaaaatatgtaattttttaaaagaaaggagtcagtccctggagattttggagcagaggagtgatatgatctgagatgtactttcaggcaagaaccaagtaatgcttacaggaagggaagtcctcggatgactgttgggtacctgagaagagggtggcaacaaattagaaacaaagggcaaggcacagtggctcacatctgcaatcccagcactttgggaggccaagacaggaggatcacttgagcccaggagttcaagaccagcctgggcaacagagggaaacccccatctctacataaaactttttaaaaaatagctgggtatggtggcacccacctgtagacccagctactcaagaggctgaggcaagaggaatacttgtgtcaggatttcaatgctgcagtgagctataatcatgccactgcattccagcctgggtgatgaggggaggggaggggaagggagaggaagggagggaaggaagggaggggaggaaggaaggggagggaggggaggaaggaagaggaggaagggaggggaggaagggaggggaggaagggaggggaggaaggaaggggagggaggggaggaaggaaggggagggagggaaggaaagaagggaggaagggagggaggaaggaagagagaaaaggaaggaaggagggagggaaggaaggagaggaggagagggggagattgatttttaaaacgaattaggggccaggcgcagtggctcatgcctgtaatcccagcactttgggaggccgaggcaggcggatcacgaggtcaggagatcgagactatcctggctaacacggtgaaaccccttatctactaaaaacactaaaaaattagccgggcatggtggcggggaacctgtagtcccagctactcaggaggctgaggcagaagaatggcgtgaacccgggaggcggaggttgcagtagccgagaccgcgccactgcactccagcctgggcaacagagagagactctgtctcaaaaaaaaaaaaaaaaaaaagccaattagggaaggggagctcagtttgggacacactgagtttgtatacctgtgggacaactgggggtataacaacagggagttatcagtgtgggactgagatttaagagcaagatcaaggacagagctagtgatgcaggaatcatacttagggaggcagtattgccatgagagaagaaaggagaaagaattggacatgttagaaaatcccaataactacagggcagtcggataaagcacagcctgaagtaatatcaaagaaggtataagaagagggtcagaaggaagccaggtgaaaagatagccatggaaagggtacagtcagtggcaccaaatgctccaaaagcatggaggaggagacagaggaagaaaacctgatgaaaggtcactggagttgcagggtagcagtagagctcaaaacctactacctggttctcatcttttcttctgagcagcttaggttgctggataagtgaggtcatgaataatgaggtcatgcatgcagataaatgcatgcagtctagaacccaaaggaagtgagattccaaagatgtgagctctgctctcctctgaccctcagccccaagcttggaaggacagcacagacagcatccaatacatgtttgatcccagccatggccctaggtccaaaggctgagctcccttcccaaaattcagataggatgtctctaacactagcacacccagcatatgcttgggtccctcggttaacgcgcgcatccagctgggacacttcgtagccatgccttgatgttactactactcaaggtcttccaacaccagcagctactaactggtcagtgctataaccatctccatctgcaataacaaatcttctacaatgttacattaacatcaaaatgatgacattcagagtataacagcaaattaattccttagaaacagaatgaatccaacttgccattattaccttaagtgggaatccaaaaaggctgtaataaataatataaacccattatatttattcatccctgatctatcctttataatattaaaccaaagaggtaagcaccatggaggagaaatcattatttctggtatgacaaggaagagactttgctggggaggggggcgttgcttgacaagaagcggtgaggtatcttttagcaaaggcaagtttataatgaggactgagtcggcttttttatataagagcaattcagctgtgaaatgggcttccccagaaatgaggtgggagtccctcagcttcttgggagccgtactaatgggttagtcatgtatgacagcttgcatagtggttactccagttgagaaggctttggacagccttcctgtgatttatacaatatcaattggaaaagcatcctattttgccaggaaagatgtcctggaaaaccaagcccacgggctcctataaggcaggtgcttcaagctaacttcaggtgataaatccaccagccccctaatatgcccttttagaaaacgcttttgcccaaaagtcacagacaggcagcctatgagccaaatctgacctacagatgtatttcaatggcccagaatacttcctttgtgggttatttttttttaaacatctgaatctgctcccaactctccaaactttcaagatgcagtgcatgctgctggtgcacagtccggatagtcttgaccagcaggtgaccagccccagatgctgtgggctcacagcttcctccttctccaaagaaatgcaaatcaaaaccacaatgagataccatctcacaccaattagaatggcgatcattaaaaagtcaggaaacaacaggtgctggagaggatgtggagaaacaggaacacttttacactgttggtgggactgtaaactagttcaaccattgtggaagacactgtggtgattcctcagggatctagaactagaaataccatttgacccagccatcccattattgagtatatacccaaaggattacaaatcatgctgctataaaaacacatgcacatgtatgtttattgtggcactattcacaatagcaaagacttggaaccaatccaaatgtccatcaatgatagactggattaagaaaatgtggcacatatacaccatggaatactatgcagccataaaagaggatgagttcatgtcctttgtagggacatggatgaagctggaaaccatcattctcggcaaactctcgcaaggataaaaaaccaaacactgcatgttctcactcataggtgggaattgaacaatgaaaacacttggactcaggaaggggaacatcacacactggggcctgttgtggggtggggggaaggaaagcattaggagatacacctaatgtaaatgacgagttaatgggtgcagcacaccaacatggcacatgtatacatatgtaacaaacctgcacattgtgcacatgtaccctagaacttaaagtataattaaaaaaaaaaaaaaaaaaagaactgccctcaaccaaaccagggccacttacctctaccacagagcagtggccaatgactgaccaacacaagggtatggtgatgacaaaggcaaggcaaggagggaccaaatctggtgcagtttgcagtccggggttccttgaggcatcaggctgaagctggacaccagccaaggccacatccttgcggagctcctatccctggctgtcttgcctccttctctactttctccttagagcagggttctcaaaatgtcgtccctacactaacaacattagtatcacctggggctcgttagatatgcaaatctcaagccccactccaggctttctggattggaaactctggggatggggcccagccatttgtggttgaacaagctctccaggtgcttctcatggatgctcgagtttgagaactgcagcctcagagtgcagcctcaattaaactgcatttacatgggcccccagctccagttctgcttcagggaacccagttcaagacaggaaagttcaggccaggcgcggtggctcatgcctgtaatcccagcactttgagggggccgatgcaggtggatgacatgaggttgggagttcgagaccggcctgaccaacatggagaaaccccgtctctactaaaaatacaaaattagctgggcgtggtggcacatgcctgtaatcccagctactcgggaggctgagtcaggagaatcgcttgaacccaggaggtggagattgcagtgagccaagatcgtgccattgcactccagcctgggcaacaagagcaaaactccatctcaaataaaacaaacaaaagacaggaaagttcacattttcaaaagaatctgctctgtccagcacctcttgaaaacggcttctttcccacagggaggcaatgcacttggcctggaagagctgctgccccacttaaacagtcagtcaccattgttttccattggtttgcacccagcctatctcaggcatactgcctggtctatgtgggccattctagacatatgatctagctctctagactgtgagcctcttgaaatcagcacttgcctttctcatatttgtatcctcacagcctggcacatggcactcatcaatgtctaccgagtcaaaccaaactgcaccaaccctgtctcttgaaagtggccaacacttctgagactcgaaggcaaaattaatgcaattaagaagccaagaaacaatccctgcaacaaattaatataatggccttatagacatcatagtcatgcattggctataatagtgcaaagatgtaatatgcaagagaaattggttgctggttcacctgatagccatcctaaggcctgaagcctgcagattaataacccttgtaattttatcccagtccatgtaattgcaagtgccatctttacttatttaacatctaattcctcaaagtaggtttgcaggcctctaacacttggttcaaatattctcattgtcttcttagctcagagagacattctttattaaagaatcaagctgaatgtgaaataaacacaaaataaaatctggctgcaaaccttagctctggaaaaaagaaaaaaaaactcatttccaacccagtgctagctgcttgcaaattacccatgtagaaaattgcccaaacttttctacccaaactgcatttgtttctgattttaaactaagttccgttcctaatttttcttcctttctccaaagcttctatctttagaaaatatggagcccaagttctataatttgcacttcatttgaacactaatgaaaagaaatgctcttccccttcaaactatttcctcagtcaattaaacaaatcctctaagtggagtgtgtgaagtgatttgtgtccaagaacttaattagtacttaattctggaatttgtatcttcttaagctcacatccttttaagtttccaccaagctcaaaaactggtccaggtgtggtcctttaccataagatcaaggcagaagctgatttgaagaagtcaggaggaataaaagaccatctgtgtgctcaaaaagacttccaagcagccttatggccaccaactaaagtcccttgcaagtccacaaaagagacagggtcaaagaggacttgcttacactgcaaaatactagctctcttatcataaggggaccacacgctcatgaaggaaaaaatacaaaataatataaaggagaaaatgcaatcagctacctagagatagactctcttcctccatgttttaactgttaaatatacaatggatgtattacattgtagatcacattctgtgtatgtgtacatgttttcccatattttcaaaactgtttccatacgtctgtctcttatttcaatgtgctccgttatcttggtaaatttgcctttcagacccttctgggctgttactctaatcatgcatcctcaaatctttagggggaaatgagtggcaaaatatagcttactctttatgtagaaagcacaggaatatatatatatacacacacacacacgtgtgctatacacacgtgtgtatatatatacataggtgtgtatatagcacatgtgttttttatatatataaatatattaggttggtgcaaaagtaattgctgtttttgccattactttcaatggtaaaaaccacaattacttttgcaccaaccttatagatacatattacatatttaattaccactttattcaaaggtgtctccttggaaatcctggctaccctctaggttacaattgtttggctggtgggaagggagagatacatgatccaagcagagccagggtctcactctgttgcctacgctggagtgcatggcacaattacagctcactgtaatcttgaactcctgggctgaagagatcctcccacctcagcctcccagtagctaaaactataggcatatgtcaccaggcccagctaattttttaaaattattttgtagagacagggtctcactatgttacccaggctggtctcgaactcctgggctcaagggatcctctcacatcaatctcccaaagtgctgggattacaactgtgagccaccatgcctggcccacctgtgctttatatacaaacatatagtatctctgtggtattaaataaatgttatgggccgagtggcaattaggaggaaaaaatgtctaaaagacttcttaagggggatgtaatgaaaaaaggttgaaaaactgtgcagtagatgactataatataattgacttaaccaattcttttaataaaatctgccgacacacacttattacttgatgtcagacttaaaagcaaaaacaaaattttataacgtctattaatgatcatacgttctttttcagtgtaaaaagatcagtttccctaatgtctggatctccaacaatctcagcattccatttcattaaaatgaaactgatctacttgttggcaatctgtactgggctcccaagcttccatatgtccatcatttaattcgactctgcaggatggaaagtaacattgaataagtcctcatgtaatccttggcacacaccatgaagtttgctcgtgcatttattcaaacatttatttaggttctgagaagttatgtgacttgctcagagtcacacatttattcagtggcagagcctaaatttggtcctaatgtcagtctgctttccacactcccacagaaccttaatgaagtcactcttggaactttctagtacttagtttctctatctgtaaaaagagagagttgaactagatttctaattgggtcttgccatttcaagagttcatttaatcgagtagctagatgtttaggttcatgggtcaaacaccacaatgttaagaccactagaaaatggaaggatatcgatcttccttttactcctccaacattttggaagaaatatatccgcactcttgagattctgcccacagagccaaagctttccagaaagaatgtgctgatgtgcttacttcaactgcgaaagcacacatctcattctgccccttcccagagcttttgcataggctcattccccggacagagcctctggggagatctctgcatggatgcagaacataaacatccagcccttcatgaacagtgttttgtttttctccaggccatcgtcctgctttccggcactaaacagcagagatgtatctgcatcaaaagactactgtctaattaaaagaaagttttaagaactatgagtcctggtgggatttctcacgaaagtgttgagcatccccaagctgaaagaacacactgagtttagaaggtagcgttgcatggcagcgtttcaagtgcatatggcctgttttatctttctccatctacctggcacggtgaagagtcctctcctgcggagatgcacacccagccgtcgagagctccgcagagcgctggaatgaggcatgcgctggcacgcgctggatggcagttgcttttcttctactgtgattcattatgcagccaggctatgctctaataagcactcgtcaggttccatcccacaggttgttgttgcatctcgaggatggagctgggattcctgcacatatgggccccagcagcatcccaagtgaaatgtgttacccaactagacatcattctcatttaacatgaactcttccatttaaaggtaaaagcagaataaatcttccctgactttggttaggcaacttagaccattcccctgactaacctacagctatgttgtgggctaaatctgcatggaccgatggaagaactaacagcaaataaaatctgaaatggagagcatgtcttagaatttggaataaaaataaatgtgaagaaactaaactgctaacagaacaggtgtgcacacagttagaatttctaaagcttttgcataaagtagtagtgagagctgtatgctccctttcaaagcaggaaatgtgagttcccaggtttcaaagggtcgaaacctcttttttgcttgccaaaactccagaattctatgccttacagagttaaagaacccctggtcagaggcttaattttatcaaatttttctaaacatgcatgtctgtcaagaatcttaaatctcctacttaaaaatcattcccactactataattagaagaagataataattattggtttgggatttttttaaacataatagtgaccacagtataactaaattgtttcccctgttgggtgggcagatagtgccttttccttctgtgcgtgtcttttcttctcatttttccagcaaaatctctaccttcccagtttctcatgattcctagtgtccactgctaagactcctggagtctaacactaaattctgtgattcatctggaacacggtaagtcgccttaattatgtacaacatgaaactaaaataaaatactaccatgcaatatatttaataggatttgatcttctcttcctttatttttaatgcaagccaaatgaaaccaaaaaaaaaaatacttcaggaaaagaagaagcctaatgagcctgctttttactttgatgtggtcttcaactgaccttttactgtagatatgtggtccttaattggaggagagaaaaaatattcccaagagccttctcagttccccaaaaaagattccaagcaacatgttctcaactccggaactcagaggccacctactagttggagcaaagaggaagcaaaagtccataccacccattacccccacctctacccactgtcctctggtccttatcccatgatggtgctgctgcccacagggtcacccaaggtaaaggctttcaggagagctttgattcctctctttcccttacctcctacaaccaaaggtccctgggtctctattaaagcatttctaaacaccattctttcctctccctttccctcccctcctcaagtcatacccttctctcaggtcttctgtgcatctcagctggatttccaaccagctcccaatgggacttcttgtcctgcctcccaagtgtctccagagtgctggttctaaactacaaatgggatcacaccagttcctgctcagaaaacatgaattggtcctcattgccaaagaaggttcagaatatcaagcatggctaaaaggaccaatgtgatctggccccagcccactttttaatttcacctccactcaattaatggtagcattcagtggaatttgatgaataaacagatttgggtcaagaaaaaaagagtgtaagattgtggcaatcatgacacccaacactacaaactgcataatctcctaagggttgtgccaagggcttcatgtgcattatctcaatcttctcaacaaggcaggtcttattaggtcccccacttgtcaatctgaaaacaggctgcacagctcatgaagtgacaaaggatgaagctgaatccaagtggaaatggcaatgtccacatccttatgtatataccacactgcattccacacactgtcaacatagggagcctgggtgacctggagtatagcggtgtggatcaaaattttgttgcaaatacccaccaggtactgatcatgatactcacttcagccaaagcccctaaaatgtgcaaaagagagccccttattgaagctaagagctcagctttcagagggttcagaagacatcaggagttctgagttccagagagagtagaaaaagccaggcacatcccatgctcataatctaaaaacacaccggcttcagttacctttcccaatcatccctgggtatatgcagagggaaaaaggatactgaaggatcccaactcccagtaaccccttttgtggagtccactgctcatcaagcaccattctaatccctgctggcttgtggtgtggaacaatctatgaaaatgagaatttacaaagcagtagacctcaggacctttgctcatgctgttctctttttctagaccaaccctaactgtccacaaccctcactatttgtcctaattaatgactataccatccttctatatcaagtgggaacatcatttcttcagggacaccctccctgagtatatcagatacaccattagatgctcccagcatgttcttcatcacagcacccaatgccattataatttttacctttgcttttgtagttacttaatgtatctctctccatctcggttacaagcttcatcatagcagaaactgtgtctattgctcagtacagttcctggcacagagtaaatgaccaatcagtccttgaacaaatgaatgaacaagcaataattttagccttcttaacagttagatttgtcattataaattagtaagttcagcatctggttttggcaccagtgtcttgtgaacttggtcagggaagcagtctccttgaagctgaccactcagccagccctgaatgaatgagtctggcacctgtgaagataaggaatagatatctctgaatagatattggtgaccgaacacagcccagcttgggcatccaggtgattttttttctctaatatttctctctcatcccttgcacccagaaaactgtgtccaggagtggtcactgcattacttatagacattactaggcacataaattttggtttgatagctcctgtttcacgcacactcactctctaaaatgaaacaacaaatgcaaggtggcacggagggctgggaaacaacaaatgccatagggaaagcaacaaaaatctaactcaaacaaacgctttccacttagagatgataaatacaacatgccatggcagcatacactgtcagcaggctgcccctttaaaaatgtaaccatcaatctgttgttaagcccacaaccagttgcaatattaatcatacttttctggcaaaagaatccatttcccaataaagtttgagtggcagagaaaaggcagagccaacaatcaggaaataaactctgcttccaaatgatctaaggaagctgctcttcttgccggctgctctctcaccatcctgctgctagcaccagacacacataaatacacatgccactctgcttcccccacatcatatttccatcattgcagagtgctctacagttctgttctagacccatttttcactttgtgccatttttgtatactttgaacccagatattccctggaaattaagagtcactttttaagcacgaccaccacctctatttagttgctcactcataacctttctttcctttttcttttttctctctccctttctctctctctctctccctccccccccccagccccctctctccctctctatttctctctcccccctgtcctctaccattaacctggaaccaattatgataagcaccatttctgttcttctgcctcaccttcagtcaactctcaggatgctacacccacgttgcaggctgtaggaaaaattcccactttgatccattgttattttttctttaagtagttactcatgaatattttccttcaatacaaatgttaggatgtcttcaaccaaatccctctggaaatgctgtgatattattgcacctatgttaaatatataggctaatttgtaatgaataccatatctacaacactaagtcttccttcctatccataaacatggtatatctctctgccttctttcataccctttagagtttctccaggcaaactgcatacaattttggttaggttaaatcctagatgtattacagtggttgctattgtgaataaacatcttctattatatattcttaatttattattgtggtacaaaagaaagttattaattttcatatgtttatattatccaacaaatttgttgaaccctctactgctaagggttggtcggttaattatttttttctctaagtaaatgatgttatacgcaaataaaccatttttcttttcccttccaatccttttaactttctatctgctttaatgcattagccagaagctttagtttagagtagtagcaatcatcatgtgtattcctatttctttctaaccttaaaagaaaatgcttctaaaatttattaactaaccataatgtttgcagtaggctttcggagaaaagcctttattagattgagaacatttccttccataatagattatattattgttctcaattatttgctgcctctctctaccaggcctacctccatggggcccctcacattgggcaaagtatggagccactacactgacatcagacttggccatgtgacttgctttgaccaatgaactatgaaaggaggtgacatatgtcaagtccaagctgacacttggagccattacatggtgcttctattgatttttcctgtctgctactgtaccaccacatcccaggcaggggctgctcctccagcctggctcctgcagtgacgactacagagagcagaaacacagccaacctacaaccaacatgcaacatgtacaggaaatcaacctttgttatcataagccactgacattttggagttactgctacagcataatgtagcaaaagctgactgatatacaacctatttttatttttctctgggcttttgtcataatagctgcctttactacacccattgagatcactgtatggttattctccttttgtctgttaatgtaatgatttcagaggttaaatttgtagcagacattagctgtccatcaaaaatactagtgctcttcctcccacagtgtggtattttcactgggaaatggctgcccagcctgtagctacactctccagctcttcttgcatgtagaggtggccatgcaactagttaccaccaacagggcatgagcagaagtgacatgtcacatgcaggtccagagctcttacaaagcagttagagattctcacattctttatttttctgctggctggaaatgcaggacatggggccttagtgagaagtcgaaccacaagatggagggagcctgggtccttcagtcatcacatggatcacctgccaaccacggcaccattccatgagcaagaaataaacctgttgtatacaggtgcttatttgttagagcaaccagtgttaccctaatacaccatccttgcacttcagggataaatccagtgatatatgattttttaatacgatgttagatttagaatgttatcattttatttaacttttagctgaagctggcttgtcatttgtcttctttggtactatcctcattcagttttgatactgaggatataaatttggtattacacttcagaaaataacaagagcagctttctcctttttataaatctctggagcaacttgaaccaggcagggattatctacttatataaaactgcatggccctaatgattttgggaggaggagaaagtttttgccatcatttccatttcttcagcagtgattgttctagtcaagttttccatttatcaattggccaacattggaatttcatattttttctacaaatctattcatttcataagagttttcacatttcacatttcacagctatacatttgtttatatacagttgctgaaccaaatctcttatgatatctaaattgcttctatagctatgattatttcatatgcaccttctctctttttattccttgatcagtctctctagaggcaaatccatcttcctaattttttcaaagaacatttggttattctaatcattattatttttccatcccccttttattgatttttactctaccttattattttaatccttcattgactcagagaatatggtctgaatgatatcagttcttagtccaagactgactttctgacctagaatataatccatttttgtgaaaataccatgtgtgccccaaaataacatgcatttagtgttttctgagtgtgggattgttaattgtgtttttcaaatccttctttgtcttttttcccagtttgttctgtttccaagaaaattatattcaaatctccatctacaatggagattatctatttaccactataattcctccaattattactttatatagtttgaggctatgttgttggttatgtttttgtcatcactattatatcttcctggaatattgtggtattgtggcattcccagaaaaaaccatttttcatcttttttgatgttcaccttaaattctacttcatctggtattgaaactgctagcctggtgttattgtggttattttcctagaatgccattttatccctttattttcaacctgtgtctttgtttatgtgactgtcttaaaatcacatattgcctgatcttttctgtaacgtaatctaagagtacgtgcatcttaatcagtgagattaaccatttattctgtaaccactgatactgcaggtttgatttcctcaccctattttgtgttttctatttactatgctttttttattttctgatctctcactgaatatattattttcttagttttagcttaacaaagtatatttttatgatttccatggttgcccttagcttaagtaaggcctatatttatatttgtttattcctttaatatctaaagactattcatgactatatcctccccacagcaagacacaacccttggactgctttcctctacctgtgatctttcacacacactcacacacacaaacttcatttctcatgttagcattgtctggaaatttagttccaggttggttatgggtcactccctccccctgttttttcagacatctccagaaccctgagcagaggaagagaccaggagaccatgctttgtttaccacattgattcaaaccagaatttaaaaccagcccaattgtgccatgaaactaatgcttatgggtttttttgaataaacatagaaattgacccccccaagtcttgaaattaacaaagttgcagttgtcttatctgagttcctctctcaggaaacaactatcaggcctcccagatagtatcaaagagctgaaactcatcagataacacctggacaatgagatgccagacccctcactcatcatgatggcctaaccgaccacctgcttcctgctgacccactcttcttcttcacccttccctaattcgtatttttccccatatagtcagatttctttcctgctatataaacccctaattttagtcggtcagggagatggatttgagactgatctcccatcttctcagctgcagcgcccgaataaagccctcttccctggcaatactcattgtatcactggtgggctgtctgtgcagcgaacagcaggacctagactgaacccctggtgtttcagtaacaaattatccttctcatttcttattattttttgtttattgctcattgtgagttatttagaatactgattctatgaatgctattattttgaatgcttttttgaggtataatttatataccataagattcacccacttcaaatgtatatatatatatatatatatatatatatatatatatatatatatatatacattttttgagacagagtctcgctctgtggcccaggctgtagtgcagtgtcacgatcttggctcactgcaacctctgcctcctgggttcaagcacttctcctgcctcagcctcccaagtagctgggattacagtcacgcaacacctgcctggctcatttttgtattttaatagggacggggtttcaccatgttcggcaggctggtctcaaactcctgacctcaagtgatctgcccaccttggcctcccaaagtgatgagattacaggcatgagccaccgcacccagccttaaatgtataatttaatgattattatttacggagttgtacaacaatcacaccatcaccacaatacagtttttagaatatctccatcactccaaaaagatccttcatgcctgttcacagtcatccctgttcacagccatccctgttcccacccctaccccaggcaatcagtaatctaccttctgtttctatggattcaccttttctggaaatgacctatacatggaaatatccaagatgtggtcttttctgacttgtttcacttagcatgatgtttctgaggttcatacatgtggctgcatgtgtcaccatccatttcatttccttgctgaatcgtattgcattggatggatgtgccatgttttgcttatccatttgccagctgatggatatttggactgtttccactgttgtgtacctgtgtcttcctgtggacgtaggttttcattactcttgggtagatgcctaggagtaaaactgttgagtaatatggtaaatttatatttaactcttctaagtgactgccgaactgtttttccaaagtggccatgccattgtacatcctcaccagccctgtgtgagggttccactttctccacatctttgctgtattagtccattttcacattgctatgaagacatacctgagatggggtaatttataaaggaaagaggtttaattgactcacaattctgcatggctgggaagggctcaggaaacttacaatcatggcagaaggcaaaggagaagcaagaaccttcttcatatgatggtaggagacagagcaagcaatggggaaactgccaaacacttttaaagcatcagatctcatgagaactcactcactatcatgagaacagcatgggggaaaccgcccccatgatccaatcacctgccaccaggtccctccctcaacatgtgcggattacaattccaaatgagatttggaggggacacagagccaaaccatatcatttgccaacacatgcttttaatcatcgtttgttattgttcttcttgttgttacatccattctagtgggtgcacttactatatttataatcagaaaaaaataagcatgtagataagtatatgaaatttatgtatataccatatcttaagggagaaaaaagaacaaaaatatcagaaggaaatacaacaaaatattaaatatggctgtctctagatgacaggattatgggtttttcttctttctacctttctgtatttttctctttgataagcaacaggtatttgcttttataaacaaattcattttaataaagtaataacataccatgaggtgttttacagctagtataatctaactttaactaccttaacatttcccagtagtgatgattagataccaaagcttcccttctgctaaagatcatacatacattgttgaattactgaagaaattacttgcctccagattgactcgcagggtaactgttggttttattaaactccagagaagaactgcagagcttccagggcccttcctcaaagcagctaggaggcatggatgcacagctgtcaccgcattcctctcacagtgcttcctgggccagcatcaaggctattcagaaacatctcattcttttacaaccatcctttgctcctacaccaaactctacaaggtgtatggcattcaagtagttttgtgtttggctagtgatgacaaagccaccccatcacaaaaaactgtttatatgctactctattagcatataatctgggaatcttgccgaagcacattcatccaacaagtattatctgagccccaactatgtgaaaagcattgtattagtctgttctcagctcctaataaagacatacccgagactgggaaatttataaagaggtttaattgactcacagttccacatggcttgggaggcctcacaatcatggcagaaggtgaatgaggagcagtcacatcttacatgccagcaggcaagatagagcaggtgcaggggaactccccttttataaaaccatcagttctcatgagacttatcgactatcacaagaacagcacgcgaaaaaccctcccccatgattcaattaccttccaccaggtccttccccgacatgtgagaattacaggagctacaattcaagatgagatttgggtgggaatacagccaaaccatatcaggcatcttgctgtgtccccttaagcttacaatctaagaacaaacactctacccaaagtacagagcgctaaggatcctaagggacaaacacacagaagggcttgtaggagtttggaaaagagttgtcttccccacccccccacaactgaaagaggaaagacatttcaaggaaacagtcacttgccagttttgggtatcattgaacatggaaccagaggtccaggaattacacgatggcccaagacaagcatctaaagggcaagaccaaaggaagagcttcccttccctgcacccattttccctctcaaatgatctttccctgatctttattctctgtcaccaccaaacttcttgcctctgtctagacaggcatacaagggccaaccaacccgctgtgaataggtgcctcaggcaactgaagtccaaatagaatgaggcaagggcgccctcactcaactcatccaaaacgagaaaaaactaagaagtcccaaccagagtcatgtttcttctacaccatgacactgcatgtgtaagcccaccctacatccttttaagaatgcaacattttacaaaagaataacttaactgcacatcatatgccaccgttttatgctaaagatcacacgtactgtgttgaattacttcagaaatgactttaacatcgacagccaaagcaaaacctttaactagaggggactgggtattttggcctgatgaataatttgcactcagtaatagggagtcatccaagccaccaagcgtgaattactaattttcaaaagaccaaaaactaacaaagtacattcaaccttaaaaccattttgaacataatcttcctttgaggattcaaaaatgcctagaaacactttaaatctgtgaataaggaccacgactctgtgttgtcatatccatacaaagttattgaataaaacctagcaggcttagagcttactaatcctactgttataaccgggggctgggagggaagaattgctcttctaatagtaaatgtaggtaaatgccagcagaactgggtataagagatgtgcctattaaggaatgtcactggttttattttaatttattctgggtttattggatacagcaaaattcaccctttatagatgtacagttctatgaatcttgacaaacatatacaattgtgtgggcaccaccataatcaagatataaaatgttcccatcactttcttaaattcatgcccctttgcagggaaatgcccctccccatttccccagtccctggcaaccatgaatctaatttctgtccatacagttttgtcttttccagaattatgaatctaatttctgtctctatagttttttcttttccagaatgtcacagaaatggaatcatacagtctgtagcttttgactctggcttctttcacttaatcttttaagagctatccatgtcattgcattgattttgtttgttaaccaatattgaaccgagacttcaaaatggtgctggtggcctcacacccaccaggttcttcgtcactgttcacactgtccgtcctttttttttttttttttttttttttctccgaaacagggtcgcccaggctgaatgcagtggtgtgctcttggctcactgcaacctccacctctcagattcaagtgatcctcccacatcagcctctcgagaggctgggattacaggcatgtgccaccatgcccagctaatgtttgcatttttagaagagagagcctttcaccatgttggccaggctggtctcaaactcctgacctcaagtgatctgcctgcctcggcctcccaaagtgctgggtttacaggtgtgagccactgcaccttgcccacattgttcttttcaggggcctctgagccactcaataccttcttcatatattaaaggagggacgaatcttcatctttcaaaagggagggcgatggttttaaaagcaaagctctaacctatgagcttttactccaggacacaaacactggcctatggagctctgtggcccaagcacagggcagggtactcagtgggggcacaacacagaggacactgaaggctgggaaggggaagaatggatgggagcgagattcattaaaggttacaaaattacagctagataagaggagtaagttctactccataccactgtaagatggctgtacttaactaaaatattctagtttcgaagagttagaaggaggatacggaacatttccaacacaaataaatgatcaatgttgagacgatggatatgctaattacctggatccaaccactacacattatactgaaacatcactatgtgctccataaatatgtacagttattatgtgccaattaaaaaaatttaaacctgttggttcaacttgactgaactgcaatctgatcagtagtcaacatgaataataccatcttagttcaagagtaaaacaatctcactgagaaaatttctcagaaaaagactcccaaaatgttatattgtgttaggttttgttttgctttggggtgtgtgtgtgtgtgtgtgtgtgtgtgtgtgtgtgtgtgtgtgtgttgaaaactggctctgaaagcatttctaaaagtggagtttccaacatcatcgtgaatccactcctgcacctcctcattgtacaaatatttactgagtgccctgtgtggctacaccaagttcactgctaggaatgattcaacttctaaacaccatcaggaaagtacagactctgggttgagatggttctgaaatcaaattcccacttttggccctttaactctgactctactgccctagagattccccagcagggtcacccaaacagagcttgatgacccaggtgctcaaaccctctgcccaacccatcctccagcacactctgccgggcccatcttttgtggtctgcacaccttgcttgttaccagtggatctgcgaaactttcagaacatccatcctggaaaaatgctcacctctgaataataatttaagtctcgaactgtcatcatccagggaagaacttctcactctgaatctgtcgtgattctagagcattcctagaatctagaggttctagattctagatcctgactcctatgcaagtagctcggcaaggagaggggagcaatggctggagaaagtgataaattctctaaatctggtttttctcactcataaaatagagttattaatccctccctgctgcgaggataaaataatggataataataatagcagctgttattaattgaaagcttatttgagggccaaataccacagaatatgcattacttatttattgattttaatccatgcacccaatcttatgagtaagactattattatccccaactaataaatgaggaattgaggctcagagatactaagcacttgctcaaaaccaccagctagtacatgcttcactgagggtgtgaactcttcatcgttatatttaacctcattcaacttctggcaatcaatcccaaagaaataataataagtcactcatacacacagaggcgcctcatggtttgagaagagaaaatcagaaaataattaaacatccaacaatgaggcattgctaatataaactgcctccatgttggtcaggctggtttcaaatcatgactgcaaagaatagtctgtgaagaccagctgaagacatgtgttcacctcccacttcttcccaaaactcactgatatcccagtaaataactacaagtgagacaatatcataaaatcactgtgaactgataaaacagaagccaggtgaggtggtgctggtagcagaaccagggcaaatggagaaggagagggaggtggaatggtgaggagaaagaagctgtttcccatcatggaagcaccagcatgggtggatacagataccaggagttggaggaagggcaccaatggtgaaggctgtctgcaggaagagtccatgggctggcctcccccagtctactcaacaatcacctctcacctcttcccccaagagcagcaaatgaattttcccaggctgaaacaggaaatataaccactaaggatccttaacaatcttccaagaaggtgcttaaatttccagagtggggattatcaccccaaaatatgttcctctttggcttagcatgaggagcagcacaacttgcctgcttttgttccacaaatgtccaagtgaaatccgccaatcaactcacctgcccgtggacaaacaaaactactcagcaatctgtgccaccacctagttctacattcctaaaatgaataaacaatccaaatcattaatgctggtggaggcaaacaataccaaagaaagaagtaagctgaacccataaaactgactccaggaaaaatagagaatccagacacaaacaagaactttcacagaacccttaattaatatcttccaagatactgaaggagattttatacacatagaacaagaacaggtgactatttttttttttttttgagatggagtcttgttctgtcgcccaggctggagtgcagtggcgccatctcagctcactgcaagctccgcctcccgggttcatgccattctcctgcctcagcctcctgagtagttgggactacaggcgcccgccaccacgcctggctaatttttttgtatttttagtagagacagggtttcaccgttttagccaggatggtcttgatattctgacctcgtgatccacccgccttggcctcccaaagtgccgggattccagtcgtgagccaccgcgcccagccacaggtgactatttttgaaaagcaattaaaactcagaagtaacaaatttacagaaattaagaacatgcctgctaaaatgaacgccaaaggaaaaaatatcaatagaaaagctgaaataaaaaattaaagaaatttcctagaatatagagcgaggagaaatatttagaaaacatagacaaaataacagacacatgaaagaccataccatgaaacaaatatccatctactagatgctcctagagagatcatagacaaaataaacaggaggaaataattaccaaaaatatatatatacttcacagaaatgaagaaagaaagaaaatgcaaagtgtccatcaagtgccgaacaggataaatgaaaaataccttttaaaaaatcctggctgggcacagtggctcacgcctgtaatcccagaactttgggaggccgaggcgggcagatcacttgaggtcaggagttcaagaccaacctggccaacatggtgaagccccatctctactaaaaatacaaaaataagtagccgatgtggtggcaggcacctgtagtcccagctactggggaggctgagacaggagaatcgcttgaacctgaaaagcggaggttgcagtgagccaagatggcgccactgcactccagcctgggcgacggagattccatctcaaaaaaaaaacaaaccctgaaatcttccaatgtatgtgtgttgagagaagtggcgtgcagacaaaacaggtaatccatgaaggaatggggattttaagtactgagctaattagcaatactgaatgttagaagacgactggatgtactttgaaatgtcaaggagaaaattattttgactctagctttctagagtctctctctctctctctctgtatttctctctctctctctcccccctctctttctctctctctctctctctatttctctctctctctctcccccctctctttctctctctctctctctcacacacacatacacacaaacacacacacatacagaatgtgaggatgaaaaagagattttttcagcctttaagaacaaaaagttttccacatacctattattttataaaatattaattaggaatagactgagacaaaatgaaaaggaatacaagaataaaagaaggttggggattctagaaagagaagaattccaggaccgcaagaagagcagccccaagatgatgatgagctcatggtcccaggaggaaggtaggagagcacttcacagcgtgcaattgaacaacggtgagatattcatgattcggtgaagaagacatccgcttcctccactcacaagaaaagcaaatgacaattagaatataagaagctgtacaataaggtcacaggccagcaaaatcaaacataacatgccctgagtctagcaactgatggagtgatcaagaaagcaaattcatctcatcacagttctgggatggggtacggttctcactgcagagacattcatccctgtcttgcctgggttttctcaaaaaacaaagcatacaacaaggacacatgggaaagtggtttatttggggaagtgattccaagtgacagtatggcaaactgggaagagtggaacagcaaaggagagaaaaatcaatccaggagtgtagcacacagtggatccccacaggggacaaacgagactccatcccactctgagaattatctgcctgggagaaggaagatgagaatgtgtactcatcggcttccatcccccattgaccaagggctgccccatgggtctggcatttccagatgtccattacatcagaatgtctgtgcaggaggcttcccaaatgccagatacagaaaagtcccaggatataaagtgagaaatatgcattgtagtatttagaactgtattttccacatacataatattttgtaatagtaactgtgttaaggagagacacaaatactatgtagacattagcactgcttgccaaatgtttttggctctcagcttcccaaacatacgatggaatcacactctttggcccctatgtggttgagtgcaaccatgtgactagttctgcccactaaactgaagtgaaagtgatatctcacttccacgttaaaacatgtgaattttgacgcaagacactccagagttttctttcctccttcttcttcctttccagcaacataacagataacagttgttccatttccatgggttgccaaataaagaggacccacagcagaggcccagttcactgtaatagacatgagactgacgagaaataaaaccttccttgtgtaaaggctctaagatctggggattatttgttactgctgcctaacctagcctatactgactgatacaatgaggcaatgctttataatgttgtttgggaagacaagtttagaaaagttaacacacacacatatacaatgattacactgtacatttaaaaagctaaatatagagaaaaaagggatatcaagtgctaatagtgtatgcccttggttgacagaatcccaaggaaggttcattattagatggtcactttttaaatcttacataacaagcatgtattatttacacaaaaacaaacattaaaagaaaacctcaagtgaggggctgtatcgaggaggagagattggtggacatcccagttatgtcacgtgcttatgaactctaaacttcagtaccttttccaccccataaaatacacaaatctcttttcaggtatcagggcaggtgggtgtcaaatacccaaaactttacttccactttacaatgtgcatatattcaaagtcttccaaacatccaagaaagttttagttgtacgttggactgtttctactcccttcttccaagtctcccaataacttgttcagcttttgcaaataggaattgtttcccaaaagggaaaagaatttgagaaaatccagtgtctagaacttaccaacatgaagccttgtgaatgcacaggtgtatgctcacacgcatgcacacacacaacaggtctgttaagtcctttctgggcccagtcttccaatttcttccacatccctctgatctattttccaagagcagccagagtgatcctcgggaagttaacacttcatgtcaattccctgctccaatgccccactggcttcccattacacttatggaatgaaatcgaaacccctaaccatggccctggagatgcaggtgatctggcccctgtcccactcttcccttgacccagtatgtaccagccatgacgatattcctctcaggtccctgaacacaccaagctactctttccatgtctgggcccctgtgctgaccatttccccttcctggaatgctgttctctggggttcccacaagccttcttccttctcaaccttcaagattcagcctaaattccacttcttcagggaaaccctccccaaaggccaccattaaaaatgagccccatccccgtcattctctcccactatcctgttcctttctttcagacacttcatcacaatcctatttcttctctgtttttttctttctttctttctttttttttttttttttgacggagtcttgccctgtcgctaagcaggagtgcagtggcgcgatctaggctcactgcaacgtccacctcccgggttcacgccattctcctgcctcagcctcccgagtagctggggctacaggcctgcaccatcacgcccagctaatttttgtttttttagtagagacggggtttcaccatgttggccaggatggtctccatctcttgacctcgtgatccacccatctcagcctcccgaagtgctgggattacaggcatgagccaccgcacccggcctctttcttttttttttttttttttttttttcagacggagtttcgctcttgttgcacaggctggagtgtaatagcatgatctcggctcaccgcaacctccacctcccaggttcaagtgattctcctgcctcagcctcctgagtagctgggattacaggcatgtgccactacacccagctaattttgtatttttagcagagatgaggtttctccatgttggtcaggctggtctcaaactcccaacctcaagtatctgcccgcctcagcctcccaaagtgctgggattacaggtgtgagccaccatgcccggcctcttctctttatttatcaccttaggtgtttattgtttggcttccctgttactacgggagctctatagggcctcatctgtctacacatggctgcatctccagcatttagaagagtgtctggcacataatgagtgctaataaatggacgaaggattacagacaggctgtggaaaggggctaacaggggtgtgcacagagtatggaagaagatgaagcaggttaccagggtagatttctaagagaaggggatgcttaagctgaacgttgagggatgatcaggtgttcagggggaaaggcatgagcagcgagggaaacagaggtgtgcaaaggcctccagccaccaaaaagagcaggaccagtgtctggggaggtctttctgcattttggatattgagtgtcatgcccatttgggagccttggagagagcttttatgccagccacctctgccttgggagagacaaagcccatttccatctgggagctgggttggtgcaccccagactctggttcctgagtgccacttgcagggtggcctctcatcaagcagtttcacacccagtgatacctcgtactttcaccctgtcacctgccattagtcatttctcccaccagcactgagaggtaaatcactattattatttttcagttttacagctgagaactaaagagtgtggaggttaagtgactcgtcagagttagtggccagatggggttcagaattcagcacctgtgatcacacccaaggcctagggcccacaacatttgtgtttctggacactcaaaccagaaggccccatgtggctggacatgtctgcatggctccccacccaccttgcaaattttcccagccccccggctatctctcaccctacttttctccttccttgccctctcctctctttcttctctctcatctctctctcccccaccgatctctctccctgactctctcccacctctcttccctttctctctcccttctccctgccctctccctgcttcctctctctgtctctgtttcttcctctctctctctctctgctcttttctccctctccttctctctccaacctctccctcccttttcctctctcttccacacctctctcctccccctctttctctcccccaccctctctctctccctctccctttctctccttctctctttccaccctccctctctctctcttcccctctctccccacctctctcctcccgctttctcccctcccacctgccttctctctccctctctcccttctctttccctctctctccttctctctttccaccctccctctctctctcttcccctctctccccacctctctcctcccgctttctcccctcccacctgcctcctctctccctctctccctctctcccttctctttccctctctctctccccatctctcctctctctccctctcttctctgcctctccctgttcccccttcttctactctatctccccgccttgctccctcactctctctgtctctctgttttccttttctccctctccctcctcttttcctctctctccgaccctatttggctctttagattgaaaacttcccaccacctgacttcagacagggatgggatcatttgccttctcttcttaacagtatcagaacctgtaggctcacaggctcctttcttaggagagcccagcatgtgaggaagggctggtgatcccaagtgagagcatagaaacatccttggggagtcagctttgggaagaggctgctggcaagtaaggcctaatcctcatgcaggagctctgcgccccattcagcagctgggcccctcctcctcctggggctcctgacagagggggttcctccactcctggccggttccccagctcagcaggctcccgccccccatccacagctctgcctgtgtaaggccagaagcccagcatgcctgcctggaatactaaacagggcccttccagatccagatgcactgagaaggccagacaatccctcacctcccccatccccaagggcctggctggagagggctggaatctagtgcattgcagggagcagggaagctcatcacagtcctcatgtggggacagaggaggcccctgatccctctgggatgtgggtggcaggctgccagctgaggaggttggaggccccaggctccccttccagacagcataaatccaatggtgtggggtccagctccctgtggcccagcacacaggcaggattgcaaggatgaaggcccgaggtaagtttggaggagattaaattaaaaagccaaagcttctgagcaccagaaggcctcagcgaccataaatctacttgcagaggagcacacagaacacgaggccaaaccagttttatttaagttgctgatgagcgttggcctctgcaaaggcataattcaaccacacttgggcctggacagtccctgcttccaagcaatgcacagtaagggagccaggaagtggaagtatggaacacttggacagtggcgaggggcctgagctacaggatcagagaaactcatgctcaaatcccatctctgtcatttctgggcagtgtaatctcaggaaggtcgcctaacctccctaaccctctttttccccactcagaaaacgggttaaaccagatggaccttccagagtcattgtgagtacctgccccacaagccccaacaaaatggtggccatcacaacaaagttgatgatgatataggaaagtgaagttaatggccacagaacattaatgagctaacacaaggcactcattctatgccgggcactgtttactctttcagtccttagaatgatactgtgataaaatgccatgatggttcccagttcacagttgcagaagctgaggcacagagatgctgagaaacttgcctaaggtcacatagctggttatggatagtactgggattcaaacctgggcagccaggctcttccacagtgacagacactgcactctcctgactctcagaatttgagagcctaaaggaacacaggaatcattttttccatattcttggaagagggagacacctaagcccagagggcaaaggacacctccagacagtgacaggatagctgaacaccagccacagctccttagaggaaacagcacaggggtctttatgatcttaagtatcttctgtgtggctctgacaaccccaaaacttctcttgttacatgaaaatcagcttacattaatatggatgcaagatgcaagtgcagcacagtgcgcgggctgtacaaagcaagcagggaggcttccgaagatgacccccaggctatgccttggcagtccccttcgccagcttccatcccccgaagccacgtgaggaaggccagaacaccaaggtccctccagaactctgagtagagaaacagagccagccggcccagccatccccagagatggaaggaagctccaaggggactgatgacaagctaaaatttggaactttatcacagactcatggttaccaacatcaaatatttaatttgcagctaagactctttttgcttaaagccatgaagcagcagcacagcatattggctgaatgcacagaccttagagccagacagcctaggttccggtcccagctgaaagaccttggccatgtgactcaacccttctgcctcagtttcctcatctgtaaaatggatataactgaacttcccaggatcattttgtacattaggaatattcatattaacagagtacgtagaatattacccaatcccctaagagtgccaggtaactaagtattcgttaaataagaagcgctccctcataagccagccctctcttcaaaaggtgacaactcttttttttcttttttttttttttgtttgaggtcttccttaggatcttcaaagatttcaccgaagaaccagcatgtgtccctgacctgatggaatgtgtccttaccaggataaaaaatcgatgcaatactgttggaaagtgaccccatggtttgaagcaaaccaaattatacgttaaagcaaaaaattacctccagaataaacgctaagcacagtgactgtctacaaaggccatgttttaagcattcgcactccaggaccctgggcttagtggcacattagacactcaataattgcatatctagcattcagaaacttttaagtggttcttattttgattcctttcccctctctgtagtgggaactgccctcaatcattctgacaggtatttctcttgccgcccacaaattttcagccctgcagtataccacattggtctggactctagcatatgcaggatttatgccaggcttgcaaaagatccctgaatcagccagtccaaaccccctctttgtgccatgtctacctcgggtgatggcagtgtgacagcattctcacctccacccccaagacacacacacacacaccctggatatctcaccataataataatgtattttatatcatgagcaggggaatacgattaaatcttcctcctataccccaggttcagaaaagaataataatgatttcctatattatgtggaatctcatagttcacaaaataatttcagatccaccatctgctttgaatgtcacagcaccctgtgtaataagtaagtcaggaatggtgtcccattagccacagatcaaagaagcatggaccagagtaaggaagcaattttctgaaggacacacagcaaattaggaggaggaatggaccccacacacaagtctgtgtactctgggctaatgctcttcaaggcctttttcctccttgctctgagcttacttcttgcaggtgtcagaaaggtacattgataggacaacttgcttcccccagacagccccacctcttcaaagatatccacaagtttgcccacacaagtattccatccctacctcctaatttccacctttacaaatggcacgtcccagccccacattgcccacagcacctccgggtctctgcttctgtctaaaatcctcatctccattcttgtgcctccaatcctgccagtctttcaggcccatctttaacagctctttatccaggacactctctgatgctgccatcacagcctgcaacagccacaggagaagccacccctctctgtatccctgtaacccttgattcttcctcgcatggtcatcatttctggtcttgggacttctcttctattagcccagtgggtacctggagggcaggaaccagggtacacttgccttgggagctcccacagacctcacatggtacctacatctagtagggactcaatcaatatccatgcattcattgtattaatcttggaaggaagcacaatgtgtattacatagagggaggtttacctgtgcaaggacaacccctttataaattcaagaatatagacacaatgtgtcgggcacagtggctcatgccagtaatcccagcactttgggaagctgaggcaggtggatgacttgagatcaggagctcaagacaagcctggccaaccagggtaaaaccccatctctactaaaaatacaaaaactagctgggcatcatgacacacgcctgtaatccccgctactctggaggctcaggcaggagaattacttgaacccaagaggcaggggttgcagtgagctaagatcgcgccactacactccagcctgggcaacagggtgactctgtctcaatttaaaaaaaagaaagaaagaaaggatatacacacaatgtaaaatcactgcaccgagtcagtataggggctgccttaaactcagggaacagccaaatctgtttatgaattaaaagaacagtcactaaggaggcaagatcaagtatcatcaaaacattaggccttgacatagaacctgaaggattcccccaagccctagggctgtatccagacagaattttcattccataactatcacaaaatgtctctttcatttccagctctgtgttagaggtcagggacataaacggctctcatctccaggccctgccatgatggacctcacagcctaatggggaaaagagacacaaaaccagacaatgacagaacaatataaaagcactgggggacacccagacaggcataatagcgcaaagagggaaggtgcccaggtgggagaacctaggctacgttatgaagatgacatttcccatgcaaatacacataaacgtgtctatcactcttgtgcacatgtgtggggctgtgtgttgggatggcattaatagtagctaaggtgttaaaaaatacaatactaaaattcccaggcaaagcaaaagtttccaccaattatccgaataatttttccaaaagttcagataataggcacgtttaagaaatttctggtacaaagaaacaaacatgtggctaccttttcctttttagcaggatgctttaatgccacataaacacatgctcattaccaagctgaaagctgatttacatagcatcacctctgaagcatacaaagataagaaaattcaagtgctccgaacctcagttttcttaacaataatacggaagtaaaatacagacctcgcaggatttgctggggggagattccatgagatgatgtatgtaaaagactctttgcaatgaaaaccacaatagcaagctcttgatcacttttagctcacacgctgggaatcagcatagtattatgggcaggaacatggactggagtctgtggatgtgggttcaaatcccagctccacccaactgcaatgatctgaggcaacactacctatgtagcctttcttagcctgagtctcctaaactgtacaatgaggattttaatgcgtacctcatagctctaatgattaaatgatgtaatatggtgaaataccacagtacaggtagtaaattctcaatacagcataactagcatcatgttactcttgtcaaatattttgtctaatatttcaagggaaggtcagaagatggagttcacaatctacataatccacagatgctcaggtgttacaagtagtgggagggagacggcacaatatgggacaggctaagagttctgggtctgattattccattcagctgctggcatggggctgactctgggagacagccacccacagtcatgggagtaggggcaattctctgaagagggcaaaaacaatcaagggtgtcagctgcatgtctcagattattgattatcttcatccatttgtgctgctataacagaatgcctgagactggataatttatacacaacagaaattcatttctcacaattctggaggctgggaagtccaagatcaaggttcagcatctggtaaagacctattcatcatagatggcaccatctaggtgtccttacatggcagaagggacagaagggcaaaagggcatggagccctagctaattcccttgagcctttttagaagggcactaatccattcatgggggtagagcttcaccgcctcatatcatgacattgctgatgaagtctaaacatattaatacagggggcatacattcagaccatagcatatgtctcatgtacttacatttgaaataagaccagcttttcactggacatctctctctctctctctgtctctttcactcacacatcacacacacacacacacacacacacacacacacacatacacttcctatgaggagaccccagacatctttttaaatgtgtacaactagttttggaaaataaaatattcagctgacctaatttttacattgggaataggagacataagtgtattttcaataaatccaccaaaatatttattttatttcaacattaagatgtaaaaagtcagagagagagaacagagtatgacagcgtcagtgagccgcccacctccctttggtgctccccaaagcctagcgcctgcagaaagctcctgccaccaccaggggcgacctgcatctccagagtgatggcaatttgtggctgtgggtgcagagcaggctggaagtgacagatggtggagaatcatccctacttccttataccttggtgggcaattatgagtctctcaggaggttccagcaggactgcacgctggtacctatggcaggagcccctggttaaccctctttgtgggcttttcctcacttccttgtctcacaatccctctctccagctgtggtttcttgggatcacctccagaatgaactacttaaacccaaacccttggctcaaggtgtactttgggggatgcaaaactaagacacagagagaaaaatgagaaaataatttagaaagaaagaatgaaggcaagaggagcattataactgatggcaaggaagacctggagggaaagagatgagattaagtaggggaaggaaaagaccagagatgaatgtcaggcttccatgaccaggaagcccctgtttactacctgccaacccaactcgtgccatctgccaaaccacacaccccaaaaacccatgcacctgcccccagatgttctcagatcccccgtccccactggcgttggtgagcactcaccccttgtcacctggtccaccagccaatgcagaggacagagtctagccccatggctccaactccccaacccaacacctccaggtcccaccttcctccaaaatcatgggtggggattttcggtcagacaactggccctgtgaggttagagaccccaagagtgtaagtacaataggaacctacactcttgataaagcccctggctgagacaaatctctttcccaagaacgtggtgttacaagagatgcaagagacaaattttaggaaacttgctgagaggctgagacccttttcagatgacaccaaaagctaactgcagccatgataagggattaccacccttgccataaaaccccactttggaccctctattctttgactttacaatgctttatataaatcctgcatcctcaatgggggcaatatcacccccaagggggcaaaaattgttcttaggatggagagccaaataatctcagatattatcgtggtttgtgaccctccaaagctcaaccctgcacaacaaaatcttatttcatttcatttcatggagaggggagatcagtaataataataataataataataataactaaaaagattccttagggtagtaataatgaaaaaaatctcaaaaaaacactgatataatgtgaaaatcctgttctggattcattttcaactcctcttaggaaataacatctaccgcaataagattttaacttctatctctcatctaatatcctgtggaaaacaaatatcacaaagtaatgcatggagagcagatgctttaaacatcacacgcgcttgccacagtaattgcactttgtaacttttctagcactttcataaattccagaagttatcttaatctccaatgctctgtagtgaggcaacagaagaaagatgatcattacttccaagtaaattctaagacttattaattgaatgactcatgctggatcacagaatgaagctctaaaaatgtcaacatttggagtcttgccctgtcccttcatcacctcgaatgcagctcccagcacacaatagggccttcagcaagattctgatgaacttccttaacttcaccatgttcaaatggaacccatttctgcccccaaacttattctgcttcccgaacccccagtgccaccagctacaacatcaccccctgaggtcccagacaacaatcttggggtatgtgtgatccagtcaatcaacataacaaagcagctaagagtccaggctacacccagcttccaaacccaatattgccacttaccaactatgaccccaggcaagctatttaacccccctgaaaaacagaaataacacctgccttccttgcaaggtaataatatggtttaaatgtggtgagacatattaaaatgcttagcacagtgccaggcacagagttggagctaaatagatggaactttccatgattgctcctgtcattgacattgggaatgcttttgctctgcagacttctaaaacagttgcacagtgtcagtgagaagactaacatggcagacagactgacaaaagtataatcccagctccataattcagtagagcagactcttcgcagaattcatttccctcatctataaaatgtgggcaacataacatctaccttgcaaggttgtggtgagtattaaatagataatgcacacagcagatgcccaacaaagagtgtggtgactgctgtggacttaattacaacctatctcaaattatcctacaattgtttctcacacagaatattgttttcaagtaccgggtcaatctggggtacaaaatatcaaagggacccctagtttccaaggtcctcttaccaagaagaaaagcaggcattgtgaggcaaacttagcccaggcctctgaggtctggaaacacatccagatggacaggggaaggtagagtgtaagcaaggtcatgggtaaagagcgtttaggctaggtctgtagtagaagcatactagaaacgcaaattttcaggccctacctcaaacctactgaatcagtaacaggggtctacaatctgcgtttacaaaccctttaggtgattctgacgcatgctaagtttgcaccattggtctatatatatggactccactgcttccagcttcatctctcccccacttccccagcccccttcatagggaccaatagctttaccgactccatgaagatcagtagttcattctcttctgatactcttttttttttctgagacagagtctcactctgtcacccaggctagagtgccatggcacaatctcagctcactgcaacctccacctcctgggttcgagtgtttctcatgcctcagcctccccagtagctgggtctacaggcacacaccaccatacctggctaatttttgtatttttagtagagacaaagtttcactatgttgcccaggctggctcaaattcctgagctcaggtaatccacacacctcagcctcccaaaatgctaggattaaaggtgtgagccaccgcacccagccttctctgctctttctcatggactcatcacataaaattcttcatgtttgcagcctctaaggaatgccaaagggcaaagtaaaaataaatactaaataagacagcatataatcatggctcatggcaggatttcaattatagttggttcccttctcctttgactcttggtgggagttcttcattcttgggtggttaagcaagtccaccctcagattaatacactcttcggcactccaggtgctagtttccactgtcaaggaatggtgtgcactgaagcccatcattcacaaggatgcaacaggttcagggggtgaggggcaggtgcctggggaggcagccccagacagactgtgcctggacaagccaaggctgccccagaccaaacaaaagatgaggcaacaaccaactgcagcagactggtgcagtaggaacagcatgaaccagaggtcaaagggtctctcctctggacccagacagctacctaacttctgggttcctctgcccaaaccacctgccctctctaagcctcttcagtaaaatcaatgtttagactgagtttcccaggagccctgtagccccatgcttttcagtgcaaatgttcagtaaaataacaaaaagaaagtaaagggttaatgctcctccatccagttttcttccagtttagaaagagacatatgtggccgggtgcagtggctcacacctgtaatgccagcactttgggaggccaaggtgggtggagcacctgaggtcaggagttcgaaccaacctggccaacatggtgaaaccccatctctactaaaaatacaaaaattagctgggcgtgatggcgggcacctgtaatctcagctactcgggaggctgaggcaggagaattgctggaacatgggaggcacaggttgcagtgagccgggatcgcgccattgcactccagcccaggctgacaacagcgagactccatctcaaaaaaagaaaaaaaaaaaaaaaaaaaaggaatgaaggaacaaaggaaagaaggaagggagggagggagggaggggagacagacgtatttgtgggaaagtaaacatttaattaaaattaagtaaaatatttttaactttctttttttttgaaacggagtttcgctcttgttgcctaggctagagtgcaatggcatgatcttcactcaccacaacctccgcctcccaggttcaagccatcctcccacctcagcctcccgagtagctgggaatacaggcatgcaccaccaggcccagctaattttgtatttttagtagagatggggtttctccatgttggtcaggctggtatagaactcccaatctcaggtgatccgcccgcctcggcctcccaaagtgctgggattacaggtgtgagccaccgcacctggccagtatttttaacttcttaaacatttttctaattgtttctacttaaacagatgaaagaatataaactgctttaaagaattttcaagtgaaatgaagatgccagatgacccaaaccctccaaacagagtcaaataaggaagaaaatagtctcggattgatatgcagctggggtgtgtggcagacagctagtcggctgaggatggacatttcatcttcccaactattcaccacctttagaaaagtttgctgaaagaaaaaggcagcaaggaaaagaagaaaaataagcattaacccattcacttgactaatatctcccataaagtaaagtggcaatacaacttgaagagtttcacatcctctggttgaaagaatgaaataaaatacaagacatcaccttccactgggctgagaaaatttagactaagtggtgtaaccgaaaaattaaaaacggcagtcattttacatcaagatcagcctcctggttaatgtctcaataggcagatggagtcagccacgttaacaggcactttgttctcagcttaaaggatcaatatcgcaattacacagtgccagcagaaattaaaacaggtttacacactagggtaatctaaacacaagaagaggaaaatcatcaggaactcggttcctgaacagagtccagaaaaacaatttaaaactcgtaacatagctgtgtgtgtgaagagggatgaggcgaagaaggtgtcaagtttggaaagaaatggcatctaaatctgacatgcttaatatttgcttaggtaatacctttaaaatgtcagagatcattagtgaattaatgttgggttattcttccgtgtagggaatcattcccaaagcacactgacttttggaataactgcaggcagggaaagctgaagaaatgggagtgaaaatgttgcatagtgtatttttcaaagatggttgcaacaatatctcccatctccatttcttctacaaggtgatcttgacactctcccatcaagtggtagagtctctctatccacctgaggatgggtgggtcttccgaccactttgaccagtaggatatggcagaagtcatgtgctggctccaggcatacctcttaactggcctggcatcttctgttttccacctcttggaactctagttttgaggatgttccctctcagaactcagctgccatactgtgagaagctgaagccacatggagaagctacttgtggacaatctggttgatagttccagctgcgtgccaagctgatgcccagtatcaactgccagcccagttgagcctttggaagacgccaatcccaatgctatccttccatattctcatcacagacctcagagaaggaagtgcccagctgagtccagtcaacccacagcaccatgagagataataatacattgttaagtcattatgttttgggcgatttgttatgcagcaatagagaactgaaacatgtgactcgagacagggttgggggcgggggcttgaggacagataagaaatctgcccctcaaaggtcttctgaatcagagttgcccttattttcttataaggacctcttcaaaaataaagcactccaaattccctagcatcgcacagaggcagggttggcgtgggggatagagggaggatgtatttgaagccaataatgtgaaaagcaaaataaacatctcaccacacataccattttaagggtgttaaaatcactgctctgagccacgcaatgggacaatcaaaataaaattttaaggtctgaaatttaaaaaaggcttcgaaaagatgcaaataaccttatcctctttaagtccctagtttaaagtaataagaaatgcattcacccaatgcattgccttcagcactaatctagaatgaagtcacttaaattctaagaccagaccccactaccccataataattggatggctgcatccaaggagttatctgagagctcaagcccttactgagttttcccattttctatttttttttccccgctttccctttctctgctgttttccttgctctccaggacacaataaagcaatggataggcggcaagtgctataatgcagtgattgcagtcatgtgagcaataatatcaggactgtatgggaaagggaccagacttcattataaataggaaaataataaagacagtagactgtggctggatgaacctcccacacatccaagtggatttagggctgagtcctcttgctgattgcttggatggaaactgggagtgcgtgcttttcgaaactctccagatacaaagatcacaaacacctccaagactcaggaaccacaggcacccaccaaaaccgggcctgatctcgactctgagcacttagttgtgagacctgacttcacttccagcctttagtccctcaagatttgatattcacactcagtatacatttttttcattttttacatctaatatttatttagctactcttgtgctaggggctgaggatatggtgacgaacaagtcagacatggtcccttccttcatttgagtgaacattcaagtggaaagacaagcaacaaccaagaaaaaggaaataaagactcaagatattatagacaatgataagccaatatagaaaaatatagggaacatgacagaagtggacaaggaagatcctgctgaaggggtagcatgtaagttaagacccaaagtgaggaaaggagttggagaaacagcactccaagcaaagagctaagtatgtgcaaaggtcctggggccaaaaagaaatttggcatgctctaggaatttttagggggaccagtgtaatagagtggggagagacaggagggagatgagtcaagaacagaggcaaaggtttgacacaaaatggtaaaaagcgttttatctcaggagcaatgggaagttattggagggtatcttaatcctttttgtgttgctgtaaaggaaaatctgagcttataaagaaaaattgtttacttgactcatgattttggatgcctggaaggttcaaaatagggcatctgtatcaggagaaggcctcaggctgcttccactcatgatggaaggtgaaggggagctggcatatgcagagatcacacagcaagaaagaaagcaagagagaaagtgaggaaatgccaggttctttttaatacccagagggaactaatagagtgacagcttctcaccctggagagaggcaattaatccattcatgagggatcacccataagttcccgatgacccaacacctcagaataggccctcctccaacactgtggatcaaatttccacatgggatttggtagagacaaattaaccatatccaaatgataggagagggttttaaggaggaaagtgactaaatctggctgatagttttaaacatcactccagagttaacagaggttacctttggggagaacagtaacagggaggggacagaggggggcttcctgggtaaagacgctatcctatttcttcatcagggcactgtgtacatgactggtttcagtttgttgacagtctgtcaagctgtatatttaagatatatgcccttttctgtatatatggttttttcagtaaaacgtttattaaaaatcactctggcttctcccaggaagtggggaggtagacagcttagttagaaaaccagtgtaggcactcggggtgagaagtgagggtggtttgagtggggctgggagcagaggaggagaaggcaaatggagaaagtcaagagacacctgtattttcatgtagttctgccttcacatgcagtgagcctcttttctgacctccactcttatgctagctccagggactcaagtaccatctcagtgacgaggcagcaccaactcgaatgaggtccaatgtgggtggggggagagaaactcagacaacaacaaatccatccaatatttatcatgcatctactacatctggaaatggctggaaaagaagaaaccagaggctaggaagggaaaggaaacatgagttatcgtgtggatagggtgatccaagggtaggggatagacaagcagcccaaggtgcaggttggcaggcacctgagaccctccgtgtagtctgggtacaagggggtccccacacaagctataggagtaagtctctgttcatactactgtgtctgatcactcctcaagaatggtcacataggctgggcacagtggctcacgcctgtaatccaagcactttgggaggccaaggagggcggatcacgaggtcaggagtttgagaccagcctggccaacaaagtgaaaccccgtctctgctaaaaaaaaaaatacaaaaattagccgggcgtggtggcacatgcctgtaatcctagctactcaggaggctgaggcaggagaacctcttgaacctgggaggtggaggttgcagtgagctgagatcgtgccactgcactctagcctgggggacagagcgagactccgtctcaggaaaaaaaaaaaaaaaaaaaaaaagaatggttacataatgggacttgtatatccactttagatcttctctaaggctctgggttctaggttctgttttaaagaacagaactgtttaaaggaaaaaaatatgatctggtgagaagtgaggtctcagaggcagagagctggagtcctcatttggaaaggaagaaaaaaaatggatccttaaagaaacttgtataatgggtgactcaaaattaatcaccttttgggaaacaggccatgttaattattcctggagtgggcaagtcagcttttgaaatgagctgccagtcatcagactttcatgtttagcagagccaaccacagcttttgtttaaaaattgaaagcccattcggatgtcatggtttagtgccaaggagggcatcatctcatcactaggcaggacatttaacatttccccagaagaaggcactcttctcacctcccgcccactccaggggagaattctccaatccacttgggtgggacatatcctcatatgtatacagcaatgcaacaaagaaacccaaattacctctattggtttagcaggaactagagccacacttagcagggtgctatccgaggaacagtgcattctattggcttatcaattacgtaacatctaacagctccttctcatcttttcagatttttatttgattggatagaaggcaaagtagttcaataaacacacacccaccctaaaagtcaaactcataaatctatccaactctaaagggtgccaaggactattgatgagggactgcattgtagaaatgggatcctctttgcttgtaaacaatggcatgggaaatttccatatgggataatgagacgtacctgctttcaaaaccagaggttgttcatttcattccattctattctgttgcatgttacgtaatataaagggcatctaagggtcaggaaactagatgaggaaataatgaaatttgagactatgtggaaagaaaggatggagtgaaaagaaaggaaggtaggaaaatggaagattgctttcaaagtaagatctttgtgcatttggaatgaaaataaaatcaatagggagtgcaaggaagttcctctggtttgaatgaatctgcccggcttcaaaaagttttacttcatgattgaatcgaaactcaaaagttgaacaaggaaattcaagcacgatttttattaaccccatatggcccagggagacttttaaaacagagacacttgctgctttctccagccctggatgttggggttttgcatgtaactcattcgtgatataaacgtatctcgtggggttttgcatgtaactcattcatgatataaacgtatctcctggggttttgcgtgtaactcattcatgatataaacgtatctcctggggttttgcatgtaactcattcatgatataaacgtgtctcctggggttttgcatgtaactcattcatgatataaacgtatctcctggggttttgcatgtaactcattcatgatataaacgtatctcctggggttttgcatgtaactcattcatgatataaacgtacctcctggggttttgcatgtaactcattcatgatataaacgtgtctccttcttttaattaactacttctctcatcaagggaaggggaaataatcccaatctaacaactcatccatgatgaactttgctgtctttcttctgtttccaaatgaatttggcttattaaaaaagtaatgagctattaattaactctacactcatacaaagctgtttaattctcaatctaattagccgcaatctgatgaaggattttaataattattttaactttgctaacagaaacatcttttcacttttcataagttatttatagaacagttcacattggatcctgcttggtttttaatttgatgacatttttattagatcctctactcttctaccatctctgtgtgacagagtttagaactgtcatcattgaaaagcccagaaatagtatcctgggtcacctacatggccaagacagtgcacccttctgtctttgaaaaaatctccaatggatgaggtatgggaggaccagaagccctgtccttctgatgtccttcttaaacaagaggcaaaactcaagtacgaaccaaggatagacttaaaactcccagtggaaagatcaaaggcttggggttactgctgaggctggatttggcagggagggaaggaaacatgccaccacacctataggaatgactttttcataactgatgcaaacaagggtattcccgaatctcttgtttaagaaacaacaggcagtgagttacatttcatttgtgtatagaatttctactggagccactacagtacaatgtgaaaagatcaaatgatattttatgtgcatggcctttatgatatgcatttctgcagacattagaaatttctatgtaaattacatattaatgtaaaggcctatgtacatcaaactatggattcaataaacacacttacacacatacacaaacttcacaaaaaataaaatgtgtttattcagaggcatttttattcttccctaggtattataagggaatagattatgttcagtgagccactctgcttctctaagatctaacatgagataagcctatttcacagttagtctcgccactttcctctaacacaggagggaacatgggagactgtttcctatgccacccccaagacttagtacatgaagaggctatatgtgtaatggtttagaaaacgaattctgaagccaactgcctgcgtacaaatctcagctccgcacttacttagctgtgtgcctttgggcaagtcaataacctttttgtaccccagttttctcatctaaaaaaaaatgggaatgaaatagtacctacctcacactcttgctaagaagattaaatgaattaatatatctaaagtccctggaataatgcagcacctactacatagtcggtaacttctaaataaaataaactctagctgggtacttctccctataaaatacatagagtttgagacactgcaaggccattatcctactaataacaatattttttaaaagctagaagctcatattatagagaacatttggccactgtagcatttcttataggcatttttttctgttgcttttttgagaaaacatagatatggtgctaaattaaatggcttacgttctgagccctcaccagtgttattatttattaaatgtcattattcattaaaatcctaataattcactaggtttttaaaaaattaaacacaggaccttgaaaaaattaaatttaaataagtaagttgaatattaatggagtgggaagcctaagggagtatgttctgaaaactagttatttatttattttaccaaaaaaagagctgtagttataaatagtattaataataacagtaataatagccagcatttattaagcattatccacattccaggcagtgtgctcagtgggttacatgcgccatttcattgcatatatagatgtgtgggaaggcattcatactggtggtcctctcctctctggattagctctctctcttatacttctttccccccaattacttatcccatgtagccagtactctgagaaggacatggcctcctccttcttgggaaaagatgcccaattccaatattcctgccctagaaggccccacaggagctgagaaggtgcctggaagacagcaggtaccaagcagatggatgaagcctggtttagaccttcagctggggagcaaggtcttcccatgagcctgtgtgtccagcatagttcatcaaggtcagagaacacacaggcatttaaatccaaagcccatcaagaaacgttctctgggagttctccactttgttcaagccccccagtcaaaaattctggtttcctttaatgataccccatcgatgataccacagagccatggttctcaaccaggggttattctgtccctcagtggacccttggcaatgtctggagacattttgggttgtcacagctgaggaagagaaaagtattaccagcatctagtgtatagagaccaggaatgctgctaaacatcccacagtacacagaacagcgcccacaacaaaaaactgccaaccaaaatgtcaattcaattaccaatttcagccaagaatatgaaacactgccgtggagtgacttagaaacagcacagcctttgggtccagacaccccgtccagggctctattacaagcagttgaatagccctgggcaactaacaatcaatcagtgagctctgcttttctcatctgcaaaccaggagcctgaggaagtcctctgaaaatccccttgcacagcactgcgaactcagcaaactgcagcaattatcaccatgactttgtcctcaaataaacctcgcaagccactgtggaatctccatttttctgtaggtgccaactctgggtactcactgaaaaccttacctttgggtaatgagttccaaaagacaaatctaattgatccttgcaggggactgaactcacaaccttggcctcattagcaccacatacgaatctactgagcaggacaaatgaagacacccaagaatcactttttcatgtaataacattcggcagctcactcaacacaatcaaagcacgtcaaacacaggatcagccctgcagaatcatgagtctcaaatgccgcatggaaccactgactctcagataccactgactctcagataccaccactggaaaagcagccatcacatcttaatggggattaaaaaccagaatacacaaggtggtgggggattaaatgagatcaggcaagcaaaacacccaagggctttgccttagacagtgttcaccagtgttattaccatcaatatcctgaaattaatgacacaacataggactacaccaaagcccaagagttatttatcagacatacctttgtgaaaataaataatagcaaaatagcaatgtcctttccacctgccttacttattcacataatgtctactcaggcttaaagacttagctcacacattatcacctataagaaatcctacctgatgagccctcaccccaggactggctgcccctctgtgtttcagtaactcactaggcttaccactatcaccactgctttcccactttattgtaattgtctctttttctttttccaccacaaatgtaggtacttctaatggtagggaatatatttttgttcatgtctacatttgcaacaggtgcacaggttagcacataccactactgaatatccatcaaatgtggactccatgtggttgaagcatggctgtattagatagctcttgcaacaaaaaaacactggcaccaagcccagtgacccaaaacaaaaacattcgtctgtgctcagatgtctgtatgttgtctggggtcaagctgaccagggtgtggcttagctgggcttaacttgggcttcaggttgggtccagatctgttccacatgactctcatcctccttggaccagtgaaccagccaatgtgtgtttctcatggcaatgaccaaaacacaaaaggggcaagcagagacatgcgctgcttcttacggcctgggtacagacacttccacctatattttattggcttaagcaagtcacgtgcttgacagcaactcaatgggtggtaaaaacatgctgcatctctactgggaataggtgtcaacttatgtggataaagggaggggtgaagaattggaaacagtaatctagtctaccatgagaatccttggatccaacgcagaaagctgcatttacacacttctagagtttgtgtatatttatggaatgtttatcccattccataatctgttatcaggagtcaacttctaaagccttcctccaatcttattttcctgttccaagcattagttttgaagtattttgaaagcagtgtgacatactcaaaagacttttgagtaggaggtgggggtcaggtgggtgggggacagccaagagccagcctggtgaactgagccatatctccaagctccatcctcatccacgcaccaaagggacagggtaacagaaactctcagacattctgtgatctgagtccaagggattgtggcccagaatcaacttcagaaaaacaagtgcactgtagcggcaagagtctcagagtcagtcctgcactcttacaccaaacacttccaaaacattcccagtgaagcttcaagttggacaatgccaggttttgctctgaaacacacacaacatagataggaagcaattcgctctcatttaaggtcaacctcactttttcccagggaagtctaaaaagattggtgtgtcaatcaaagtgtaaggcttaaatcttcttgttccttttgtaactagatagcatcgacattcagtagagtcaactcagccatacacagcttgggtctatcctctttcatggaaaaaaaattgtttttagaagtacaatgcacttacctttcatgagttcagaaataaatattttgtggttgatttgaaacagggatcagcaaaattcttctgtaaagggacatataataaacattttcagcttgtcgctgcagtgtgaaagcagctaccagctgtatgtaaacaaatgagcaaggctcatgaggtcgtgctccaatataactttagtcacaaaaacaggaggtggaatggattcagcccatgggccatattttgttgatccttgagctaaaagaatgagtaaatatttgcctaatgttctagaacattggtccatacctccaagaagcccaagaaaatgtacaaaattcaggtcatttttttggcagagtctgatttaaggaatgcctctgaacacctggtacttcatttaatcctcctcacgggtcgatgaaataggaaaatatattcccattttttgttttttgaatgagtctcactctgtcacccaggctggagtgtacagtggctcgatcttggctcactgcaacctccgcctcccaggttcaagtgattctcctgcctcagcctcctgagcagctgtgactacaggcacacgccaccatgcccggctaatttttgtatttttagtagagacggggtttcaccgtgttggtcaggatggtcttggtctcctgacctcgtgatccacccgcctcaacctcccaaagtgctgggattacaggcgtgagccaccgcacctggccatatattcccattttataaacgaagatactaaggtttctgaacttagtgatccacccaagatcacacagctagtacatggtaaagctgggattccaaccaaatcctgtgtaaatgttggttcagtagttttcaagaatcataatagatgttatcattacgcaccctgagcctaaaatggttacaaagaatgaccagaaaatgctaattttattctaagaaagtcaacagtgatgaattcaaatttatgagtaagctgttcattaaagccctttttacaatagtaaaatattgcaacaatctaaatatccaatattaaagggacgcttgagcaaattacaatataacctttgaaaataatgttcataagaatatgtaatgatattggaaatgttcgccataatgttgtttttcaaaaaactagaaaacaacacagtggcaaaggcatgactctgttgttttagcccttatattaaatgtataaaaagctctggaagaagacaccttgtttatcatcatttagctcctggtttggggacggcaagtagttttatttttattctttgaactcttggttttgccaaactgtgttcaatatacataaaattctataatctgataagtatgtctttaaaatgcaatttatccttgttttctattttttcttctattgttctattttattcattcttttcttataagtaagttgtccataagtgaacacttcaaaagcaacaattccatcccctggattcaaggaagaatcctatgcataatccttcacatgcatcatgacccagattatactggtgtttagaagggtgaagcagtggtcctttgagtgttcagacccagttcccaaggagcacagatacacctgaatcccatcttgggttgcaagccctgttgagtaaaaagaaaccttctggtttcaacattcatcctttttatgattattgccaaaaaatttttaacaaacattaatataatgcataacatcccagtaccacttgtgatgtgtttaataaattctgtgtggtttttacatagccctgagaggtaagcaatgagtcaggagtttcctccaagcacctgttaagtggcatcatataaatagcaatgtcaggaaatcaggtaccagaagaaccaggcttgagtctccagcaaggccacatgggagctgactgaccctggttaagtccctgaaaccctcgggcttagcaactttattcttttggtttttgttgttggtttttgtttcagtggtgtgatcatagctcactgtagcctcatactcctgggctcaagctttcctcccaacttggcctcccatagtgctgggattataggtgtgagataccagacccgtccagcaccctgattcttaaaccaggagtagtaaccacactttcaacacccacaatagaattacgaggatctaatgaaaatcacaaactatatcaaatatataaagggtgttctgccatgatggccaattataatactgggagtgcttcctgtccctaccacttccagatccagtttttttttttttaaatggagtctcactctgttgcccaggctggagtgcagtggcgcgacctcggctcactgcaagctccgcctcccgggttcaccccattctcctgcctcagtctcccgagtagctgggactacaggtgcccgccaccacgtccggctaattgtttgtatttttagtagagacggggtttcaccatgttagccaggatggtctcgatctcctgacctcgtgatccgcccgcctcggtctcccaaagtgctgggattgcaggcgtgagccaccacacccggcccagattcagatttttaaaaaacattgttatcttggaaattggttatctacttctgtactggaggaagacagtgtgtgcatgttgctgcacgtgtgtgtgtccatagatccttgtttcattcagctgtgcagcaacaggggtcaagtctacatgaaaacgactgacatattcttccagccactgccagtcttactgcttccttcaatcaagctttttggttttccataaacatttttcatgttttgcataggtattttaagtaaatttttgtattgaaattttgtattaatatatgtaaatatacatacagaaaaatgtacaaatcacaaatagattgctgagtaaattttcacaaacacacttcgataactgccagccaggtcaagaaataacatgctaccaacatcgcagaagctcccttcattgttctttccagtccacatctcccggctccttctcccaggataattgctgtcttgacttctatcactgtagatgagtattgcctgtttttgaaatgctcattaatggtatcatacgctatgttgttacctgtgtctggcacttttatacccaaagttgactgagattcacccatttcattgcaagaagtagttcattattcattatctttgctggatggtatttctttgcataaaatatatcacaatttatccattctactatgggctttggggttgtttccagtctttggttcttacaaatgctgctgagaacatttgtgtacatgcccatgagtaaatatgtttacccacttcggctagctatacctctaagaatgagataatgcttcataaattatgcatatatctagcttattagatctgccaaatttatccttccagtagcgatgtatgagagtttcagttgctccacatccttaccaacacaggcattttgtctgtatcagttaatgaatctggtggatgcatactgaaatatcagtgtagtttttatttgcatttcctggtgactaatgagattcagcacctgtgcatatgcttagtgtccatttgaatatcctccctggtaaaatgcctcttcacatctcttgatacaatgctttctttttttagagacaattcttgatttattcatgccaagacaagaaggagtggcagagaaaataaaaaataataggtgtttcgaaaaaatattttaaatttgtctttggattttggttttgatgctaaacttgagtaggaatttccttgaatttttcaaattcataataatgccatccatagagaagctagaaaaatactaatgaaagctgtcatttaccgagtcatctcacataaagtgttctatgaggacactgaggttcagagaggttgaataacttgcccaacactgaacagctactaagtggctgaaccaaaattcaaactctgtctggggactccaaaacccaggctcttgatcacctagctattcctcagcattataggattctagtccccggcttcagcatgctttagaatccccgggaggatcccatcctcagggttcctgattcagtagggctgcggttaggcctgggaatttgcatttctaacaagttcccaggtgattcccaggatgccagcccagggaccacactatgaaaaccactgttctgaaaggtggcaatcaggtctcacttatctctgtatccaaaggccccagtccagtgcctggcaggtatcagacatataaatgattgattactaaatgattcctactccctcttggtcctctgtctggcacacagagccatgccgctgtgacagctgtcagctaatgtgagtgaaacccctctcagtcctagaaaggcctgtccacaaacatgaagagagcaagaaactccacttatgatacggtttgggtgtttgtcccttccaaatctcatgttgaaatgtgattcccagtgttggaggtgggtcccagtgggagatgattggatcatgggggcagatcccttatgtatggtttagcgccatccacttgttaacgagtgagtgctcgctcagttagttcatccaagatctggttgttttaaaagtgccttgggcctcccccttctctctctcttgctcccattctcaccatgtgatacactggctccccattcaccttccaacatgattgtatgcttcctgaggtcctcgcaaaagtagatgttggcaccatgcttcctgtacagcctgtataactgtgagccaaattaaacctcttttctttatacattacacaggcccaggttttgttttgttttgtttgttgttgttgttgtttttgagatggagtttcggtcttgttgcccaggctggagtgcaatggtgcaatctcggctcactgcagcctccacctcctgtgttcaagcaattctcctgcctcagcctcccaagtaaactgggattacaggtgtgagccaccacacctggctaattttgtatttttagtagagatggggtttcatcatgttggtcaggctggtcacaaactcctgacctcaggtgatccacccaccttggcctcccaaagtgctgggattacaggcgtgagccactgcacccggccccctggtatttctttatggcagcacaaaaatggcctaatacaacttatttcttccactttcttttaaacaagaggtggataaatcaacacaaggggaagagtaaaactgttccctggcctggttgactgcatttgagcaaacatgcccatgacctatctcacttgaaacactttccacactaggtcttttagaatgcatgttgtggcagaaactgtcagtcatctcctcgaatctactctttcctttcttattgagtgacaagcaccatgactactttctgagccataagatacaagcagagttagatcttccagggagtcctcttaaaagagagagaacacgcccttttctatgtcttcctgctgctagaactcaagtagccaccttgggccatgaggttcagggccacaacccctctgaatggtagatgagaaaactggaaagagcctgggaccctttcaactgtaaagtgccacaagaccagctgcattgcctcttctgtgacaagttttacaagaggcagaaatcaatttttatcttgtttaaactactgttaatttgaaacttctctttaatgcagctggacattatcctaactagtacctacaggcactatgacccagctgaaagaccaccagatgagatttagccttcctcttttgtagtatatcttaaggcaagtcacttcagttcctgaggctcggtttccccatctgtaaaaaaggaagaaaaatgtgtgttgccattgattcgaaaggcttttgtgagacacaaatattaccttgttcagacatgctttatgaaatacagagccctatgaaattgtgaaggacttttatttccgacaaacaaaggaatttttaaaagagaaaatgaagtaggacaaggccttttataagaagtcttttctaattaaggagaaaggactgaactggaccaacagcttctctgctcatctctgccaagtctcctctcccaattccatccaggtcattctttattttccaaatgggaatttaattttgctctaacaccattattacatccaaattaaatatttattgggctgactatcaattgacttttagaaataaagatttgaaatttatgagctaacagagtaattcgataattgtaaatttcacaaccgagctttgtaatcaattactgtttagtaatgatataaatgcatgttcttctcaggagaccccagtcaactataaattagattctgcacacataacaatctggcaacatctccacactggctttgtctcttctcgggaggaaccaaggccaggaaataatcccgggctggctttccctggctgtgcatttggaccccagttcacccatcagtcaggctgtgctgagactagacttaatgagtagtcacacaaaacataattcagaagataaatcacctgcacataaaacctcacaatccaactcaaagagacgctgtacaatgggtaggtaacagagacaatctttcacgcattcaacgatccaacagatagctactgagtgcctactatgtgccaggcacctttctacatccgtgtagaaaacaaagatacagtcaccctcctagaggatgagaatagggtgcaatgaaccataaacaatacatgacagaaataagcaaattacactgggctgactttaggaaataaagatttgaagttcatgagcaaacgtggagtgtgaaaagactggagtgttagaaagtcataaatgctatggaaagaaacagatttttgagataagcattgtcctaattttatgaataaggaaattagagctcaaagatcaaacttagaaactaagttagatttgggaaattttttttttttttgagacagaatatcactcttattgcccaggctggagtgcaatggcacaatctcagctcactgcaacctccacctcccaggttcaagctattctcctgccccaacctcccaagtagctgggattacaggcatgtgccgccacacctagctgattttttttttttttttaagtagaaatgaggtttcatcatgttggtcaggctggtctcaaactcctgatctcaagtgatccacccacctcggcctcccaaagtgctgggattacagttgtcagccaccgtgctgggccagatttgggatttgaactctgaccttcctggtgccaaattccaccctctttctaccacccacactgaatgaatgaatacctgtacacaagcacttttgacctcatttctcactgactgcacaatagaaaaatccctgttaataagctccccccatgtaagagactctcaaactcagaaaataaagctaagactaaagaaatgctctatagctagactggacgttagcatctataagcatccaacttgcttaaatctagacttggcttgagcaaaacttgtattttaattttgatgtgataaatgctagcattattttcactatgaaaaaatgttcaagcaattgtgtgtattactgttcatttgaaacccattctttgtctttgcaggactggccaactataagagaatgcattctaaattgagtttctattagaagtaagcatggtcaaaggggattctgaagccctcagggagacctctgtcataatccacagattctggtaattgattagagagcttttaagtgaacttgctgattacattttgaattcttttatattaattattaaaggcgaattatgttgttgaaaaggaaagccacagaaagatggtaatttaatcaaataggttagagaggcattctggataaggtaattgattttaaaagtgaaaggcatttgggagaaggtttgtcaaaaatggatttaaacaactgaaaactgtgtacccaatcactgtttgtgtattgcttaaagatgaaaagaaaggaccgggtgtggtggctcatccctttaatcccagcactttgggaggctgtgaggcaggcagatcacctgaagtcaggagtttaagaccagcctgaccaacatggtgaaaccccgtctctataaaaacacaaaaaatagccgggcatgatggtgggtgcctgtaatcccagctacttgggaggctgaggcaggagaatcgcttgaacctgggagatggaggttgcagtgagccaacatcacgccattgcactctagcctgggcaacagagcaagacttcgtttcaaagagaaaaaaaaaagaaagaaaaaaaaaagattaaaagaaagtcattgagaatttggtaggacctgtccaaataagaagaaaaggaagttttgttatacttgtaaaatgcacttgcccactgttatagtcaatgcctgactgaacaatccctgcactgctatctctttataattttcagtggatgagttcacacaagaaaagatttcacctgaactctgtagttttcttcaactgtcccttttcaacaaagatgctaagacttcccaaagatacaaaaagatgttacaaaggtcagagcccaggcttgaaaattactatattatttaaagattgaaaaataaaattttgttctcttgagaatgacaccaccccctccagccccaatatccctttcagtctctcctcaggagacgaggccaccttgtgatagtaatagtaatagtggtagcaggaagagcaggaacactgcacagagtggtggtgcttcccaggagtagtaaacatccatagagtgcttcttctcaacctgggtcccagaatcatcccttgaaggacatctgcccagaagcaacatcgaaacggaatcaactgcattggattctgcgtgaacaagaaatagacttacgattattatttccaattcttcttttcattgccacaggaaatggaaataaggcaagggtgaaatatttgtggggtagatttacttatgattgtaagctatttttcccttctttggattcctcctaatccctaaacaagaaaaaaaatgcaactctaaacatggcggccgggcgcggtggctcacacctgtaatcccagcactttgggaggcaaaggcgggcggatcacaaggtcaggagatggagaccatcctggctaacatggtgaaaccctatctctactaaaaatacaaaaaattagccgggcgtggtggtgggcacctgtagtcccagctactcgggaggctgaggcaggagaatggcgtgaacctgggaggcgaagcttgtagtgagccgagatcttgccactgcactcctgcctgggcaacagagcgagactccatctcaaaaaaaaaaaaaaaaatagctaatcagaaaacacagccaggaaacatcaccaccctaatgcacctgctaacattaataagagccagagaagcccggaggttcaataactcccagcaagctccttggccatcctctagccatgttcctgcagccacaaacaccagccagaaaaggagatgcaacagaaagcccaggccatcacactgaggcacaactcagtgcagacgcagcttcttatggccaacctgggcccagagggatgttaaagagcccaggttggtgagtcatggacatgtccttctccacctgggcattccaaagagaaactctttttggaaggaatttgcaaaaagaaaagtaggagggtatagtttctacaataagagagcctagggccttgctgtttctgatggtgggtgaagcccattccttccatgctagacttaggctaacctctacctttcacttggttttgatgcatggcattttgattgagcgattttcccaattttcttcccatagctgcaaatctggatacttggagatactgctagttctttgatggtgacaactgccatggaataataagagcttaacaaaaagctactctttccatagtagcggttatggctttgattggagtgatactccaaccatgagcatgggaaggcagggttagttagatgtaacttacaggaagaagacaaagatacccactgtaagagtggtgagaagcagagcaagtctgcatgaagtaaacatgttagaggcagatgaagccagcccaaggcccccatttggacaactgggagatgttcagttgaacacttacggacataaaaaaggacaaacagatacaaagaaacgtcagaaaatttttaataagggaagatgaataaatgaccaattgttgactgatctgcactcagtcttgtcttggaccaattgctacatctatcctatctcatattacaaaacgcagaactctgaaaggttcaagtccctacgacaaataagcaatttgttgctcttgacagtcttggagttaccaacccattcttttggcctgccccagcacaaccactatgggggccccaaaatagtcaggtgaaaaggacagaaggcagaacagcacttccactgggtaggtcaccaaatgagaaagttccagcaatgagaagaggtttcctaatatcaagaagggatgcagagatgcaccagtctccccattattaccactgctcctggccgaatggacttgggctttaggactacagaggtgccaaacccttggcttcactggccttcagcacatttgaaagacaacaaaaaatcagacagcaggctaccagctgttagcccactctgtctggctgggtttcaaagttaggaggtcatctgtatccttctcccacagctgcccacactgtaagctgagggaagatgccccaagtcattctcaaactatacctatcacccttcatcacaattttaaagttatatttattcgtacatataaagttatacacacatatatgtatacagtacatgcatgcgtgtgtatatatgttttctatccatctggcctacaaagctataagctccttgaaggtcctgcatgagggtcctgcttgttttcttgttgtattcactctcatctagccctaaccctcaccaggtcattcataaattagttcagttaatgactggacctttagttttagagcctgactctgcccaagggggtgtagggggcatagaggccgaggtataaatggcttccccagcatttcaagtaggctctaaccatcactgtaagaggaaggaggcagagtcctgatcccatatgtcaggaccaccgcctgtgatccttcacagtgtgccctgcaaaggagcaccaagccacgaggacaagagtcgaattgacaggcccctctccccacatttagctaccaggggctgcatccgtgaagagggagtacttttttccagtttgtgcacatcgcgtggctagtgagctctgcctgccacaccctttctgagcccacaatttttatactctgatgaaaaaagtgactgatgtgtgatcctctgtcaagttcctctcttccccttcttaccaaacagaacgctgcctttagactcagctgctcctccagctccactcccctccccgactccaaagagttctttttttttttttttttttttttgagacggagtctcgctctgtcgcccaggctggagtgcagtggcgggatctcggctcactgcaagctccgcctcccgggttcacgccattctcctgcctcagcctcccaagtagctgggactacaggcgcccgccactatgcccggctaattttttgtatttttagtagagacggggtttcaccgttttagccgggatggtctcgatctcctgacctcgtgatccgcccgcctcggcctcccaaagtgctgggattacaggcgtgagccaccgcgcccagcccaaagagttcttttcgggagattttgtaacacagaatcaagaattcacagagagacctagaactaaagaggcaggagacacaaggaaagaatttaagccaaaacaactaagttgatctacgtaacaaaaactatacaagtgggtaagagcaggaagaaaaaaagaaaagaatgttgtgaaaatatatatttggattcccattgatagtcttgatgatgtgagtggataagtgaatgccctcttcatttgtttgtgctcctaaaacacaaccgtcattcagagactgaaccacatgggtttatgggtttataagtgttatcttttattgagatggaaggaggcaaatcccagaaaattagacagacactggggaaaagtagaaaacactggaacatattgtcttttcccttaccccaccccctacccccagaataaagtgcaccaggtaggagcagaaataaaaagaagccaatatttattggtaccccctggtaccaattcaaggggaactgtttaaaggccaaacccatgacctacacaacagccacaggattcaagagaacattcacctaccacactcacgaacaatgcaattgcctcgtttctcaataaacatgacttctgaatagattcaatcctgttcacagaagaataaagaaaaaaaggaacttattttttacatattgaaaaaaaattggggtggagaactgcatgaagataccctgcaggtatatgcctctgaaaataatctacagaatccagaagaaaatttcaaaaatctgttcgtcatgctgaaaaagaggccaagggctctgagagtcagtgcagagagtcactgggagacataaggcaaacacgaaaatgtaacaagatttggtgaaataaggaaggattttcaaaaaaaaaaaaaaaggaaaaagtatgtatggtactaaaagcaatatctttttaaaaaatcaatgaaacggaataaagctcagaaacaagccaaagtataacaagatcaagtcttcagcaactggtgcagagacagctggctaagcatctaaatacaaatgaagccaggatctccacctgacgcctacaacagtttgaccatgtgtcaccagtctgcacctatcaggacgcaggtagaaacacattaacagtagcaattcaataacactggcttctgtcctattgctgatttagcacctccagcctctaacaagtactcccaagtatgcctgggcatccccaggaggtgtttcatacaaccacacatgcatccaccctccacagcttcccatcagacttggtccccacaccactgtgctgagccctgacacagcttcagggaagcacaggtgtcctcggatccttccaaggacaagcttcaaagtcattcatgccaaaattgggaatcacacctccactcttgtccctgctgggtaattccagggcagatctgctttttcccagtatgcaacagacattagtaaaatgactttcatgctgttttcacgttttggaactttcaaatgtttctgtaataatgatatattatttctataataatttgaaaaatctgacttgacagaaaataaaacagaattttcctcgaccaaatttgtttttaaaaagttacttacttactttctatttcttttaagtatcctctgtcttgtcaaagaattattcctcaaagaaacattcaggcctagatggattcataggtgatttattcagacaagcttttatttttcaaacaaagccagcataatactgataccagcatttgacaaagaccaggaaaaaagagctcaaaatcaagtaacttatgaacataaacaaaaatcctaattaagcacttagcaaatagaaattagaaaaacattttttaaaataacgcatcatgctttaataagattcatcccccaaacacaggctatcaaaataaacaccatattagtaaattaaagagtaaacattttatagtaaacttaatagataccaaaaaagcatatactcattcctcatctatgcctgagctaataagaaaaaaaacacatcttgataaaatagaactcttgcttaactcaatgaaaaatttacacacacacacacacacagtcacaaccatgccacaaaataatcagcacagtacttaagggaaaaatgctagaagtgttcccattagagaaaggaaaaaagcaagaatgcccattatcaccattgttactgaacattgtactctgagtgctattcaatgcaattagataagaacaaaataatataatgaaaaagagatagtaaaactatctttacatgtagatccttgtatatttgaagaagaaccaactaaaaagcttatagaaaaactaagatttcagtaggtggattttaaaaaaacataagaaatcaattgctttttaagccaagaatagaaaaaatggaaaaagatatttctcaaaagagtaaaaacaaaactaaatatttaggaatgaattttacaaaatcacccgtaaccctggagggttttatcagaggacaaaaaggaactactgaattcagtgaatatgttgttcttggatactctgtaatatccaatgttgtgatactgcagacgtaatcccaatcaaaagtctcaatttatgaaccttgacaatatgactccaaagttcatctggaagaataaacacagcatgaagaatcagaaaaatctaaaaatatgattattttaaggatttgaggagacttctcctgtaaagagtaaaacataatgctgtaatgcaggaagagacaaggaaatataaccgaataaaataaccaaactagacacaggccaatatggaaatttaatataagctagaagaggtatttcaaatctgtaaggggaatagagagaatacaatagatgatgttaggacaacttgatagttatttgcaaaacttggataaaagatttaaaagctttatatatagtttatatgatataatatgacatataattatatatgagtaaaggaaaaggtaaagtgttttatcatcttggattggataatgcggttcttaacgtgaaaccaagttgagaaaccaataactactttgattacataaaaaataaactgggcagaaagagatagcataaatagtttaaatacaggtgcttgcctggggaagaggggcggacatcaactgaaagggagctcaatggggggttctggaaatgttctatatcttaatctagatggtggtttcgtaggtgtatacatgtgtaaaattcgctgagctgtacagttaagatttgtgcatttatcatgcataaactattcctcagtaaaaaagaaaaaataataaagaaaataaatcatgcatttatacttcctttcccataaagactacatttcagggtaagaaagacttcggactgagggaaaattcttcttcatgcaagttacagctaagaaagacaaaagggatgaaagaaatagaaactcgttattttgcaattcctactgaagtaatctggacaatgtcaatggttgttaaaagcattagagtgctggccgggcacggtggctcacgcctgtaatcccagcattttgggaggccgaggcaggcggatcacgaggtcaggagattgagaccatcctggctaacacacagtgaaacctcgtctctactaaaaatacaaaacattagccgggcatggtggcaggcgccttgtagtcccagctacccgggaggctgaggcaggagaatggcgtgaacctgggaggtggagcttgcagtgagccaagatcccaccactgcactccagcctgggcaacagagcgagactctgtctcaaaaaaaaaaaaaaaaaatagtattggagtgctggttctgaaacgctagcctgcatcagtgtcagagggtttgctaaaacacaaattgctggctcccactcacagagtttctgattcagtagacctggtgggggcctgggaactggcatttctcacaagttcccaggtgataggtgataatggtgctgctggtccaggcactacactttgaaaactcctgcattagaaaaaagactgatgttgaaatttataatgggtaaatcaggctgaaaacacctgaacttacggatcagtctgagcttcgattccacgggacatggaggaacagagggacatgataaacaccaccataaagatatagtcagccaaatccagtatgggaaatctacagaacaaataacccagagtctccaacaaataaacacaacaaagaaaaggaagggggagccgttatagatcagtttaatttatttagaagtgaaaagacaaatttagatactgacaaagattctttgcttggccaaactttagtcaggcttctgaaccttttccttggcccatctgtgtacttccttgtaaaatccagctgaagaaagagtgctgctaggtcagtttagcaagaacttcccacctttgctctctgatctccctcacttgaaatctgaagtttctcgtcctccatcaccctggcgtgtcttcaggaagagtcctcttaggtcagtttagccagaattccccttacccctcatgtttcttcctggtaattttctatccactgatccccaccctgctccttggctataaatctcctcttgcccatgctgtattcggagttgagcccaagctctctccccaactgcaagaccccattgcagtagtccctatacccatcatgatggccctgaataaaatctgtcttactatgctttaacaagtatcactgaatttttttcttctttaacagggctgattcaaactagctacctattttctaattgggaggttaaagaaaatttggtggtattaatgaattgttgtcagttttgttgtctgtgataatagaatgctgtttatcctttttgacatcctgatctgttagactaagggtttattaacctcagcactgttgacatttggggccagacaattctttgacgtagaggactatccaatgccttgtagggcacgtaccagcatccctggcctcaacctgttcacgccagtagcacccaccgccaccattcccagctgcaaccacccaaactgtctccagataatatcaaatgtcccctggggagggagtgcaaaactgcccccagttgagaaccactgagttaggtatatcttctggaggatttgcaagtgaagggttatgtctggggttttttgtgttttaaaatactccagagaaaagcaatggggagtgagagtaaatgagatgcagctagaaaggcacgatgctgccaactgtcgaagtggggttcagagtgtacctgggtgtcgttagtctattctctgtgttttaatatatgtttgaacacttcttaagaaaagtgtttacaaaaacgtgaacacacataaaatcatgctgtagaaacatgtttctgacagatgttcatgatagtatgtggggaaaaaaaggaacagatcatgcaatatgtacgcggtgaccccgtttggatataaaagagacacagagagaaactcagaagagagatgagtcaaaatattcacattgatggtctcctggtggttagaattgtgggtaataattttcctcttccagtctgtagttttcaaagctctccatgtgaacatttacctcctattcaatgtagacaaacaaataaaataaaaactaacaaagaataaagggactgttacaaagaaacacactgttggttgggaaagaaacagaaagatccttcaaagcaaacacaagatcttacaaagtacaacaataagagaccactgagtgtagtgaccaagatatcacacagcccttaaggaaatgctgcattaaagaatgcaagttcattgacagtgtattggaggcggtggggggctttcgtctttcctgattctgaccttgaggcatctgaattccacttgatctcccctgtttcagaaggcagagtcacatggaataaattttagaatgccttctctctaaacagagaatggtgtttttcctgccaggcaaatgtttaaactaaaatttttaaaataatcacttggtgcttaaatccacagcaaagtggaaatagtcagctattaagctagtctcatgcctcaaaggttctgggcaactggagttttgctcttctgcttttcaaagccaaatataaattatctgctatttaatcacctgttgctatggctcacctgagcagctgcagcccggctttagcacaagtaattaatggcgagccagaatacccagttttatgaatcattctgtagcatctggcctaaatgtcagtttcctttccatcttaaactttcccatagtctgctgtaaattcatctccgccttcactagaacatggaacccataaagaaatttgcatgttgcctccttcaatgctgtagctttactgcctagaagaaagcccagcacatagtaggtgctcaataaatgcttgctaaataaatgactgaatcatgttttccgcccctttcttgatttctggccttccaagaaaagaacaaatgttctaataaatacgaaaatttattatttctaaggctaccaaatggcctgaattatcagcttccttagactccagtaacatgctgcttacctgtatttttggtgagtgaatgaaggtattaacacagacctatctacccccatactacacacatgcacagtacatgtgcaacacacacacacacagagcactctgcaacaccctcagacacctccacacccttggacctaatgatacgtgtattttctgtttactccctgtgcctcagctagtaagcgcttgatctcattgtcttcctaataaaatgaattaattttcagagttaaaattcatgaggcagcatatgtaaagtctgtgtctataactgcttctgaattccctccagctgcggacatttttattctgcccacaaaggctcccgagtttatttgaagacgtttctttgtggccttccccagggtccccagcagcccacagtgggttttgctgctacttccagacatttcctgtcaattcactccagtgtttggcaggagaactaatgccagattctagaatccaggctaactttaagctaacaatctccttccattcccgtctcctggtcttctacctgtgactactcaggtcccccagaatgtcactccaaatccttcctaaccaacccttagacatctagtccaacctcctcctgaggagaagggaaaactggggcccagaagggtgaggcagcatgttatgggtacatggtaagtgagaagcaatgcagggacaatgacagaggtctcctgacccccaagatgtcagtgttctttctccagagcaagaatcagcaatttacagcctgtgggccagatctggccctctgcctttttttgtaaataaagttttatttgaacacagccatgcctactaatttccatactgcctgtggctatttggggctataacaacaggactgagtagttgtgacacaggccatacgaactgcaagccttaaatatttgctatcttactagttgcagaaaaagttagctactccttctagaagggtcaaaagaacaggaagatggatgggaaagggctgacacaaacaccccatggaaaaccaactgagcctctggctgttctcctcacaggaggccggctccacaggggaatgggaagatcctctggggcggcaccaaccatttccctgactcctcttcccccaacgctatagtggcctctctcctttgcagagactgcagccctatctgctggcaggcaccttaggctgaccctgccaacacatgcacacatgcactcagacacacacacgcgcgtacacacacacatgcacacgcaagctgagttccaagtgtgacatggctgccataaatcagcctggaatattaaactcaagctgccatgaaagagcctctcaactccacagcacacagaagaccaagaggtatgggacccatcttcagggaggaagccttttgcagttcaattcacttccccgggttcaagttttgtctaccaccctcgccagctgggtaacctggtgttacctaatttctcagcccgtggctcctcatcaataaaccaaagctgacctctgttgtgaggattcactgaagtgatgcttgcagagctccaagcatagggcccggcacagagtgagtgctgagtgggcactggcaagaggctctctagggattgcccgggctctctggacaatgcaaggcatgattctagtgtccagaacagcctctgacacacagggtctgaaacagccttctttattccaaaagctcagaaacccaaagctaaaagccaaccgagtaggccagagccaggaggcccaggccgccctgtttggctggaacacccgggctgccggcgtggctcggagccagcactgcaggcaggcagccttgacttcctccttcccagtcctgatagacatgagccatgcgaccctgggcaggccaccctgtctccatgagcctcagtttcctcatctgtcacatgataacagcatttaccccacagggttactgtgaggactgagtgaaacaaaatacccgaggacctttgtaccgggcacaggtgggcccctccataagtgagtcactgccactgtcatgtaacacggtaatagttcagcctgggaatgtcttccacagtctgaccacagaaccccctcacctgtgacggggtcactcgcatctccgcccactctacccggggattcagtctaagtggagcctccctcttacccttcccagcctagcctcacgccccaccagtcccctgccacagccacacatacctggaaggccacaccttgccactgaccctgttcccacatcaaatgattttgtcaacatgaaaccaaaccacaaccaggtggatgcagagcctctgtcacactcagtccttgctcctcagtttccttcctgtgtgaccatgggagagtcattcaccctctctgggcacaaactcaatcatttgtaaagaacaggcttcagatcagatattcaagttccttccaccttgagaaacactgcagagattctactatgaagccctaatgaagacgccccatgtaactggctaactccaatgtcaatttccacccaaatgcatccacttaatctaatagagaccgcatggtacaggcaagaagtgttgctttgctaacaagaccactaaaggcctcagctggagactgtgactttatcaatcgtcctggcctcctccctgtcttgtgctcagtctcttttgcacgtgtcttctccccactcgattgttgttaaatcttgatttttttctgttttcgcttacatggaaccatggggcttttccagctctcctccatactccctgtgccttcactctctgtggcttcttggtcagtttgatttttcctgaattagaattaaaggccttggagaagctccgagcagtgcaagtcctgggagaccacgttccaggacaccagaccttgtttagtattgcccatcgcagtgtgaacactctaacaacaaagaacttgccacccgcagtggcagtccaccccatgttcacagcattctgaggctggaaaattctaattttctaatggcccgtccctcgacagcaacagaaggcagtgtccgagggtcccctggagccaagccagacactgggctattgatttacctatgagggagggaggtgttcttcctctcccaagtgtaaagtatctaaggtggcccaagctggaaaacggtcaccccaggcctagaacgcacattagagccccaagttggtgttcccaatggctctgccacgtggggccctttctcctccttctccagggatttagaagtggagcagcatcggcatctgggcctcattgcagaatgaggggacaaaaggcttcttgtacgataaggagacaaaagcctccaagggacttaccacaaaacagaagcaatattttaaatgctttttagaacatttgcatgaagataatccagaagtacagtgaaaaagaaatacaaaagatttgcaatgaaatctccttcctgtttctgaccacaggccacccaggccccttccccagcgtttattacaatcagtttcttgcatttcctctcagtgataatttatgcaaaaaactacatgtatttaaatatgtgtgtgtgcatatccttttgttttacaactgataaaccagaagacaaaattctgtacctcgcttttttcaattcatcgatcttggatattgttccattaatgcttagagaactggtgctttctctttaatggtatttcacagcatggacatttgcctcatgtctagccttttgcaagtatgagtaaagctgcaataaacatcccagtacatacatttcctgcacatgaacacacacacacacaaaatcagataaaattcctagaaatagaactacttttagatggacaagagttagcaaacctctgggtagtgtgtgtgtgtgtgtgtgtgtgtgtgtgtgtgtgtgtgtgtgtgtgtgtgtacatacatgcacgtgtgtgtaagtacatgcatgtgtgtgcatgtagtgtaaagtggttttgggtttttttaattaatacaatgggctgagatcttctagttgtagagtattagagctaaattggagctcatcctatttcacttcatctgcttttctttgagtctgttgttcctcaatttcatccacacttttggttattaatgcccccattcagtgtttcagattcaccagggcttcttaagccagtttacttttttgagacttaatgcccttacagagccactgtgtgtgaaattatcttttacaatgctgaatccaagcagtttatagttttcagtcaattactcccaaccaccagagctgtgctcaggataacatttctggctaaatttcttacttcttggatcatgaattctcagacactactaatcctggtgtctggtgagtcaacatattcggactcacactcaggccaaagactctctccaaacttagaaatccacattcaataagccacatgtgcactggaaaattgtagcacaaatgccaggctgataatctcgataatatttcacagtccctgataaagagctaacttttaagaaatcctgaagcaaaatcatttataattttttaaatttccgtggctaacaaaaaacaaatcactggtcattaattcaaccatgtcagttagctctggctgtataacaagctacccccaacattcagtggcttcaaatcgccaccacttatttaccttatgattctgtgggtcaatgctctgagctaggcccagtcgggcagctcttctgctggtcgtggcgaggctcagttatgcatctgtgatcagcagctgctcagcaaggtggctctgcttctagggatggctggttatcagctggggtgactggggcaaccgggccatgtatgtcaacatccagcaggctgatctgggcttcttcacatggaggtgtcagcagggaccccaggaatagcaagtaaacaagccccagacacaagtccctttcaaacctcaggcagtgtcacatttgctactctcccattggccaaaacgagccacgtgtccaagcccagattcaaagggtagagaaatagactctacctcttcatgggaaaatgtacagtgttgcattgcaagggtatggacagatggtaaggggaagaattaatggccatttttacatttatcacatcaacagtgtataaattcatcaaacctaaatagtatttgtataagacttcgcaataaatagaacagctctcaattactctctttattcccagaacagtttcttgaaacaggatccacataaaagcaacacctggagagacttctagtgcccgtggttgagtatccacagaaccattccaagccatcctacaagttagcattcaggcacccttgatcagatgtggtgagcctccgagcagctttccttaagaccacagacacacagaagaaaaagcatgcgacgtggagtacagaagactcaagtctaacctcaactctcaaagcaaattacttcagctcttctacatgccatctgctccctcatttgccagcaggaacagcaggaacaatctaagaattgctaagaggactcaaaggaatcatcctatatgcccatgccctaggcacctggaagtgcctggaacagcacagcaaagaccttgaaacagtgaatcatgcccaacgttctaaacggacttgaatgctcaaataaaaatgacagatgtgagcaggaggctccaaggaaagacaaggttgtgagccagcacacagaagtgggagacagaaccagcctggccacagggcacacgactgtcccccgggcaggatttgaaagttgaagatggcagaactgcatgttctctgtaccctctgtggaagcagccaggtcttggatctgcacaaaacattctctcccctcaaagaagagtgagtcccaggcatgtctttcctggggaaacagccctgcctgacctaagaaaggcatgtgaatctatagggccctattaagggcctgaagaatcgtgctgcttgctgtctacagaaggaaaaaaccatcccccatcacatatatttcaaggtaaataacaagagctatagctacaatttgttgaacagccatatggcagaacctgttccagtcaacccacctacattaaataattagcattcatgctgcaattatctacccaaagacaactgtgtgcctatggtgtaccagattccacccaaggggcaggagaagccgtgttgacatggccataccaggcatggtaactgcccagtggagtcttacagtctggtcacaatcattaatgctacagatgctgcctctaccaacagaaagagagcacttaacttttatgaatgagcatgagcactgcatgctggactttgcacacattatttcagtgactctccacaattacccttgaagtaagcatcatcatctccaccttacaaataagtgaactgaggcccagagaacttgtctaacagcaacaggcagcatggggctgagctggattcaaaccgggggcaccttccaagagaccctgccctgccacggctcctcttctccccataaggaacggtgttgatgagcaggacaatgttcaggggtggtgatcagaagcctccctcctcttcaccctgggttactcccaacaatccccctacctgatcttcctgaaactcttagacaaaggtaagtggtgcccatttctgctatccctctccctcctcccttcaactttccagagtcttcagcaaattgatctaataaaaattcaacagctcactggctctaaatctcaggtctggttttttaactgcctaaagggctcacagggttgctaactcggcccttgaataaaatctaaaacttacacacttgtgcattcattcattcaacaaaaacttaccaagtgcccaccaaatgccaagcccagcatgacagcacctaggtaatactgaagaggtttacacaggtaaggctgggcaccacacatttacagaggccacattttttaggtctgagggacttttctctagcagtatctagccacctgataaaagggaagaaaagagaaagagctgtgtttgtccaggtgttaaggttgagatagagatctaaggaaagggtactgggattccaaaaaagagaatggtggatatgatatctatggaatccaagctgatctgggaagcaagtagacacagaaagaggcagacagacagcagaatcaaccaagggaccttgcttgatgtgggcacttccatcaaaaatggccattcaactggagcaaacaagaccagaccaggatggtgtctagagttcacataagcagcaatcccacctaacgcatgagtgccttctatagggtcacaaggtgctgctacatctggtaacaggaaactctccaccttccaaggaacccattgccaagtgagcatctgcctgctgggacttttgggttctggttcttccatccacagctacatagagcaagggtccaggatggggcaccatacttccagtgcaaccaggctgccctcggcccttctcaatgcacagatatccatccacttccacgattcagtgatcaactttgtgccaatggctccaaggtctaaaatttcagcctctatccaagcttcagactcaaatactcaactgctcaccagacaccctgaccacaacatccctgagcactcacactctgaatgcatgcaaacctgagctcgtggccttgtccccatatacccaaacactgcattggaggatggatcctacccaattcccaactgggcaccatccttgatctctcttcccaaaacacacaaataatcaccttcctattcattcttcctcctaacaggttctcagatacagccacctaatcccttctatccccactgcaatgactcccaacaaggtcaccaacatctctctcctggcattattatctttctcagggaagttttcctaactagtcttacttctaccaccttacccactctatccattttcctggcatggaatcaaaagtgatgtatgagtcaatttttatgaaatgtccagaataggcaaatccatagcgacagaaaggaggttaacggttgcctggggctggaggtagggtgatacagggaatgatgctaatgggtacctggtttcttttgggggtggtgaaaacgttctaaaatggattgtgatgatgattgcacaactctgaatatactaaaaaccgttgaattaaaaaaaaaagtgatgttttcaaaaagaaaagttggtcacaacacatcactgcttaaaatttataagcagcttccactgctctgggaatgcagtcatcagttacccccaggatctgcaggatctgaccattcaccccactggcctcacctctgatgctacagcatacctgtcaactctgtgctccagccacattgggcattttgttcccacaacatgccatgctggctcacctctgagccacagcaaaggctgttccctctgcctcacccctaccctctgcttctaatgaaacactagacttctcctctcatggtatctcctgctgttttgtaattttctgcccatttatctgtctccttccaaaatgtctgatcaacaaggaaacatgtctatgttgttcaccaatgtctccctagtcctgacacataggaagccctcaataatctactttatttatgtatttatttacttatttctttatttattgactagaataaagtagattattgaaggtttcctatatgtgtaatcctttcatctactccaagcttgttgaaagaaagcaagaatttccaactatcaatcaccttcactgatctgtttcctatatctctattaatgcagccccaaatggcataggcttcttaagttgccacaattcacttcagatgcacacataatttccccttgactgaagaactcaaggatttttctattacatactgttaaaccatctcatacccaagcaattctccaatttaaatacttgctgcaggagtttcttatcaagacagaaagaaggaaagcccattttcaggatgaaaaagagaatgtgaacactttcagcttccatttttatctggttcagccctggctcacagattaatttctggcaccaggatctgggaccagataacagagaatcacacagaagagccttctccagctctccaaagccagcaagaatcactcttttcacaatcgtccattttacaatgtgtctaattataactgaataaattacttctgccattctgcagaaatacttaaaataaatagctctctttccttgaattaaaatcatagtcttttgttcactgttttctgttccataaagcaacagagtctgttgattaaagatcatttataggacttcgttttcaatcttttttatgatatcactttaaaatacccccaaatattcagctgcaaggagggataagaactactggaaattggctctttgagagtttttgatgagaaatgaagtcgtggatgtaactctcagcgaatgagcatatattagaaaagtcgattttaataactacttggttcttcttcttggactttttttctctacccaacttcctacatttttcttgagattacaacataatccccactgacacactaaatattacctctctgtattgaatggatgacgctgagacaataaatcactttgagctaacacaatatgccaaccagtcccagctaagccaaatatttgacgaaagacatacaaactgaaatttagcaaggcaggaatgctttggggattatgtcctgaatatcaaccatctctagaccctatgtagtgaaaaaaatagatgttcaaggaggccatatgtgaatgcataagatgattctgtgttcagaataaccacagttagccaattccaggagatatcttgggatgagattgtgattaggccactctccaaacactagtggatgtcacgacaaaataaagactcttcacttctgaaccaaaaaaaaaaaaaatcaccccaaaacacataaactattgttcttctgcagtggtgtagaaacaaacatgatgttgatgaaaaagactgtctgggggtactgagcatgccactagggaagctgacacctcgggtcctctcacttgcatgggcccctttcaaagcccggtgctaatttggtatctgaaatgctgtcttctttttcttaaagtgggcccctgaattgtgcacacttccacaaaaccttccagagctgcccctgtggaccctactttagaaggattgaaatgggactccagagatgccctcagctgtcaatacgatggaactatattcacaggtcatcctaagtcccctaaaaggaagacagagcatctctggccagcagccaaggccttcccagggcagctccagtgaacttctctgactcccatctcactcgcccaacctgccttccactgaagcatcagtgatcactaaccagcttcatccactgtcatgtttcactagagctgggacctcagccaagcatgttctacctcatgtcttctctccaggtacctctgctcctccttcagaacctactcgaggggcatcagctctaagaaacctgtcttggtgcccccttcccccaagatgaaactgtgtcctcctatgtgccctgcagcttggagcttagtaccttccctgggtctgaaatgtggctccctcacttactagaaacctcccatgcctcagtttcctcatcagcaaaatggaaagcaacagtactcccctcataaaatggacacgaggataatccttgttgcacagtagaaactcaataaacgccaaccatcatcatcatcatcctacacatcgcttcgtcagaaatccctcaacaactcattctacctcccccatcagaccagggacttctcaatagcagagatggaagcccctgtgcccagagcctggtgctccataaatgtttgctgagcacatgaaggaattaagtaatatttatattatgaccaacagaggtaaaattcaataacacatcccacagcctcttgtttgctaacatttcaagtctatattggagaatttgatgaaaagcataagaagacagaacagggagcaaaacagctctgcatcatgtttctctgtctattcccaagagcatcccttcttcatcatgggccaacagagcccagagctgctagctgtctacaaaacccatctcccaagggcagcttcattcatcgacctctctttgcagacagacttccaaggtgccttcggctgaaaaattctttcatctactccaagccaaagcaggatcacagaacctggcactctcacccagaaatcaccacacacaccatttgacccatctagattcttcctatcaggttagaaaacatgaataactctatagccatgatgagactttaaatctacccaagacctcttcaagcaaagcaagggctctgtctgtggaagctgcaataggtgtcatggaagtgtacacgtgcaatctacacagagcattgacatttccataccctgggctggttgggtggggggatctgcctccatgtttaacctcatcttggccacaccctcacacctgcccttcactcccaactccacaaaatcaatctgcatatcctcatattaaatatatgcttcaattgttcacatgtcactgtcctagcacatttgtcactctgcctggaacggttctcaccaaccctccatcgcatccctggggcaagaagtatccatctcaataatgtctccctactcctttcaaccccatccccaacttttgaggcctcctggacccctcttcttcagactcccctagttcttgccccatgattctctcagcactgttgttgtatgtctctcatccaccatatgttatctctgcaaccccagcacccagcacagcaatggatgcacacagcatgtgctctgtgaatacctgatgaatgaatgattccacgagaaatctcccctgagatcacagacttaaattatgctccacataattcctgagtttcttaaaagaagaggtgttcccatccagtgggtcattgctcattaaccccaaaaccatcccagctatttttatagagggagtaaagaatatgtgggttgatttttcaggaagaaatttcccatagcagaaccactctgaaggctgaggtgtagcactggtatagggttcatatgcctcaaaaatgtactgtctgctaccttttttcataggcaagaaaaataaagccgcagaagtgaagaaataagatgggctttactctcacctccaagattgcaaaacatcagtagtatctgctcaagaaatctttaacgtgcttgaggtaggtcagagatgttgttttttaaaatgtctgtgtgatcctcttacttctgcaagacaaattaatgctgcagaataactgggggaaagaaaaaaatctagatccatgttctgttggaatgcagcttgctctaattgttttctcatgtaattacatatattaccaatataattacaaataatacacatatttgatttgtgcaattatagaatagtatataatttttaaatgtggtatgtttctttctacccaagatccctttgtgaagaaaatgatttatcatttctaaaaatatgcccctgtgcattatgttttaataaagcaaaaattagtaaatatttgcctttcttttatatttcaacaaaataaactttgtcatgaaaattcaagttttaaaaggctcattatatgctttgaaaaactgcttgcactaggttaattctattcactggagaaaagccaaccaaatactatgattctcaagaaaggtaattataacagacaatgtataaggcacagtcaagggaggtatttgagaaggcctgggataggaggaaataacacctcaatgaatgggtgaggaacagcctatttaagagtgaaagagacaagtgagaaaactgggctgtgtcccttatcagttgtgtgtctttgagcaagcaactgaacctctcagaactttcatgaagtggaggtaatttaccacctcactcattgtacagttgtgaaaattaaatgaggtaacatgtgtgaaaggccctagcactttctcacttagcaaccatgcatgtcacgtggtagatggttcctgccgtaacagcataaatcataaccctcatctaccattactgtatttctctttgcaagatgacagttcaccagatctgctgcacagcatctggaacaccgtggtctctaagtctccctttttggaaggtaaaatggcaacagcctgcattcattcaaagaggagacttgtgaagggtccagggaagaaacgtgtgaacatccgtgagatgtgaagggaaatgcagaatattaaactgtaaagaccagaaaagaatttccagataatcctcatctgactagtgactcacactgaggttctattggatccacgcaatagaatctttgtttaaaaacttagccaacatttaaaattaggagatttcccataaaaccttggaagtacacattctcattctgcaatgagaagcctgggtaaggctgggcccaagatcctctatggcagcaaccggctggagccaaggagtttgctccctaggtagccacactcgaaaggctgccctctccagtgttcattatttgcataagctatggcaccctgagacaaaaaataaataacactctcaagtcgatcaacagacaactcagaactgaccagtaaaggataacggtctccatccccacctaatactcagccagctgctgaagcctcctgtttctggggccaactttgctttcccagcagctataatcacaacggttgtcacgacttccacagggtcttttctttttcttttttttggagattgagtctcgctctgtcgcccaggctggagtacagtggcaccatttcagctcactgcaacctccacctcccaggttcaagtgattctcgtgcttcagcctcccagatagctgggacaacaggcacgtgtcaccatgcccagctaatttttgtatttttggtagaaatggggtttcaccatgttggccaggctggtcttgaactcttggcctcaagcaatctgccctcctcggcttcccaaagtgctgggattacaggcatgagccactgtgtccggccttccacagggtcttcaaatgcccaaagctcactccgcactggggagaaaggtgaccctaggagaaaactgttacagagttggtacaatggagtgtcctgcctacctagagatgaaggcagatgtgatctgccttcatgctgaacctcacatttaagaagagaataaatggatcacagtgcatctgagatgtcctgaagactccatctaaatattcaagaatatgtatctaatcttagcacttcagtgtggtaaaaaatggcatagactggtcgggtgtggtggctcacgcctgtaatcccagcactttgggaggcctaggagggcagatcacctgaggtcaggagttcaagaccagcctaaccaacatggagaaaccccatctctactaaaaatacaaaattagccaggcatggtggcttgtgcctgtaatcccagctactagggaggctgaggcaggagaattgcttgaacccgggaggcggaggttgcggtgagctgagatcgtgccattgcacattgcactccaacctgggcaacaggagcaaaactccgtctcaaacaaaaaaaaaaaaaaaaaaggcatggactccatggcataggaacagaaagcttctaataaagagagttaataaagaggtgggggtgggggaataccaactttcctggcaagaaaactgagtcttggaaagttttagtaattcatctgagaactagaaactgaatccaggaactgactccagatatgaataaacaaaccatgtagccttacttttctagttacttccctccataggtacatcaaaattaagaaaccaagaacttggccaggtgtggtggctcacatctgcaatcccagcacttcagaaggctgaggcaggaggatcacctgaggtcaggagtttgagaccagcctgaccaacatggagaaaccccgtctctactaaacatacaaaaaattagccaggcatggtggcacatatctgtaatcccagctactcaggaggctgaggtaggagtatcacttgaacccgggaggcagaggttgcagtgagccaagattgtgccattgcactccagcccaggcaacaagagcgaaactccgtctcaaaaaaaaaaaaagaaaccaagaacttgaagactaatgagactgatgagatacaactctcaactctcctgaagatggagaagaaggctgagctcaggaagccctcctgataaagccatctatatttttgagccagcaatagtataaagaatttggagcttctttttactgcaacatctggatgaagctttttaaatatttcattcgggattcattcctcgtcatggaaacaactatttcatcaaataccagaactgctcagaaaaagcctctgtctcatattcaagttgaaccacaggctcaaagactaagtaaataagtgtacaactaccttgaaaagttagccaagaaaaaaaaaatggaaggaaatatgccagaatattaaagtggttaactgtgtagtaggaacacaaacagatatcatttttgcttctgtctttttcccctagtatctttgttttctcaaatgggcttgtattacttgtttaaaataatctataactagacaagaaaaaaatacatatgaattcattgcacacaagtgatggagctgagtcaggcgtcttgtcctgatctggacccacagatctatctcagtgtagcttagcccatttttgccttctctgccccctgctagactacgtgaggtctccccaatgccttgccatccccactgtgtgccccaatctgagcagcaaggtcctcagcacatagtagctacctaataaacatttataaagtgaataaattcatagcatcttgtatttcctttcacacattcttcctctggacctgtcaatgtagaggatgatactcaggtgaatgatatttcctggaagatactatacaattaattacccttgtaacctcaaaaatcatatttgaaatcaaatctgcacaagtgacaagtaaaggatataaaacatggcattctccttagcctcttaattacatactatatatcaagcttctcccaagctctgaaaatgtcccatttaacattctacacttggcattcaattgcaaaacctgaaatggagattgtattacttaaatacttcccaattttttttttacctacttgttctacatttttacccttcaaccaggttttatctactccctgtttccctcttatgctgttgtatgctagccaagaaaatttagggtaacactcaattgtttaaatccagatacttccattgtcctaagaccaaggggcatttacctagtgcaaaacacatgagtgagtgggcaaaggcatgttgaaggcacacaacagaatcatccctctgaccatcctctccatgaagctaatatcttgagatacatagtggacaccaatatatatagtatgaatgaaactttgtttaaaaagtatgcatgtgtacaaacacagatatgttaatatatccataggaaaaagtcagaaaggatacacacagaatagcaaataataattagctttgcatgaggtgaagtggaaaagccagtgggctaaggaggtagaaatttttacttattttccataatctagataaataaggcaaaggaactataaatgaattgttcttatgtttacccttttattccaaataaaaaagtactaaaatggtatgtaagtgagtgtgttatctgtataaaggttagttccctgccttcaggagaaaaacacagtataaaataattccagaactcacattatacattattacaaccacagagacaaagaggactctccggatacataaatatatacccatcctatctcctcaaacaaatggaaatcagattcagacaacatggcctcaagaaagtctcaataaaggtcgcatgctaccatgccactatttgggtatttggttctgtttatgggaggagttctgtaaaaagattagcgcaatcggtcaatgtaactgcagtgggattgaatttccacagaggctggcaacaagctcagcacagagaaggcaagaggatgaataaattatagcaagaacatgaggttcataaccaggaaagaggagcgaatgaagccagcctctcagaatcaggtggcttgtagagaaacctctagagatggctccatccctctccccaaaaaaagaactgctgcaagttccttgcaggtgagaagatactccaattctatatcttcacgtcttggggaaggaaacacccaagtagtaaatccattaatactgtccttacaggtgaggtattcctgaaaactgcttaattccccataaaagcataaaattgttttcttctaatcatttcatcattttgggacttatatttaagtctttaatccattttcagttgatttttgtacacggtgagagataaggatctaatttcattcttctgcatatggatatccactttcccgaataccatttactggcaagactgtcctttccccattgtgtgctcttggcacttttgttgaaaatccattggctgtaaatgcatggatttatttatgggttctctattctcttccattggtttatgtgtctatttaatgccagtaccatgctgctttagttactacagctatgtacagtattttgaagtcaggtagtgtgatgcctccagctttgttatttttgttcaagattgctttggctattcagggacttttgtgattccaaacaaattttaggagtgttttttctatttctgtgaagatcatcattggtattttcatagggattacactgaatctttagattgctttgggtagtataaaactactagaagaaaacataggagaaaagctccatgacattggtctgggcagtgatttttttggatatgacctcaaaagcaaatggaattgcatcgaactaaaaagcttctgcatggcaaaggaaacaatcaacagactgaagagacaactcacagaataagagaaaatatctgcaaactgtacatctgataaggggttaatattcaaactatataagaagttcaagcaattatatagcaaggaaataacctgattttaaaatgagcaaaagactcgaatagacattgatccaaaaaaaaagacatacaaatggccaacgggtatatgaaaaaatgctcagcatcactaatcatcagggaaatgcaaattacaactacaacgagatatcatctcactccgttagaatggctttcatcaaaatgacgaaagagaagtgttagagaggatgtggagaagatagaacccttatacactgttggtggaaatgtaaattagtacagacattatgaaaaacagtatggaggttcctcaaaatattaaaaatagaactgccatatgatccagcaatctcacttctgggtatatatccaaaggaaataaaatcaatatgttgaagagatatctgcattcccatgttagccaagatacaaaatcaatctaaatgtccatcagtggatgaatggataaagaaaatgtggtaaatatacacaatggaataccattcagccatatcaaggatgaagccctgtcacttgcaacaatgtggataaacctggaggacattatgtcaagcaaaataagccaggcacagaaagacaaacactgcatgatctcactcatatgtggaatctaaaaaaaagttgatctcatagaagtagacagtagaatgatggtacgattggctgggatggttagcagggagaggatgggggatggtggccaaaagatacatcattacagttaggagagaaataacttcaagagatctattgcacagcatggtgactctagttaatgatgataaattgtattcttgaaaaatgcaaacagggtggatgttgtgctctcaccacaaaaatgataactttgtgaagtaatgcatttgttaattagctagatttaaccattctgcaatgtctatatatgtcaaaacatcatgttgtacatgataaaaacatacaattttttctgtcgatttaaaaaaagaaataaaacattaaaataaatttttttaatgtaaattggtttctcactcttcagaaattagcagcctgagccctcaccacaagacttccacatatgtgaagggagccaagtcgcttgttcagttcctctctttttaaaaataatccctgttctcagtattcctccctgggagcactttgaaatctgtccatcattttatctgggcatttttacacactattcacgacacctccaagcaacattgaacttccctgaaattgagaaaggcatggggagtgctgggtgggtccttgtgctgggaggaaccttgtttgggggcttctctctttgctcctggtgttggaaagatgaaaggccttatttcctgatcagcactggggacaggaaccacagatcaagtggacaagctccacctgcatcaggcatggaggcttgtccataacagaacctcagaattaggagctacagcatcagaggggccttagcaacatccattttacagatgagaaaactgagacccaaaaaagggagcgggtgcctgtggtttcctgggaagttaatgacagaaggagactggaatctagggctctgagctcaaagagctaaaatgactgatgaatggagagatggacagatgcctggatggcacagagacagacagactcaggggatgactaattggcatcttggtataaaatgatgaatgaggagaaagtcttctcccaaggctgtgttggcccatggttccaaaacctgtcctgagaccccaccccaccatcttaaaatttcctgccatggtttacaatggacaaagagagtgaatggttggatcaaacccaatgctgacttggatggaggagggaggattaaagcctacatactctttatacagcaagagtgccaggatctcatcagttcctcttcagtcattgatcatccaatggaaaaatttgctacagctacactggagtgtctgagatcattgagagacaccagccacaagggcttccctgcctggcttgcagtgagagctctttgttgaacattttgagattcaaggaggggtacacccacattaatcagctccttggtcagggttcaggcagagatggtagctggatgtgatgcatcagttgtcagaagccttctgccccttcatccatgcattcaacacctacttgctgaatccctatcacatgccactgttttaagccattgggacacagcaattaaaaaaaaagacacaggctgggcacggtggctcactcctatcatcccagcactttgggaggccaaggcgggaggatcgcttgagcccaggagtttgagaccaggctgggcaacatggcaaaacactgtctctctactaaaaatacaaaaaaaaaaaatagccaggcatggtggtacacacctgtagtcccagctacttggggagggggtggaggcaggaggatcacttgagcctgagaggtcaaggctgtggtgagtcctgatgatgccactgcactctagcctgggtggcagagtgagaccgtgtctcaaacaaacaaaagatacaaatccctgccctcttggatttacatcttactggggatgggaagcagaaacagacaattacgagaaatataataaagtacactgtaaaggtagaaccttaactgactccctctgcaagccaacccatagctgattatggtgggagggagtgggcactttgcagtattaaactaagtagttggtgggggaaggagactcactaattttcccaggacagtcactcctggcttattccagttgtagaccaattaatgtcaattagtttcttttagtgctacctttgtatctcaaaagtgtcctggtttggatggcaagttatatatcggtcatcttattgagaagtatgctttcagactccaaggaggcaagggagttagccaagcaggtatcctagggaagaacaagtagagcaaagactccaaggtgggagtgtgcctgatgtgttcaaggaaaagcaactgggcccagaggctggagcatgcatgggttacagggactaaatagtcatgggcccttccaagttttccaacaaaaactgtggttttgctgagtgagatggaggaatttgggtgagttctgagcagaggagggacatgatccaattctgatttgcagtgagcctttctggctgccatcttgagagtagattctgtcaagacaaggcagaagaaggaagactgattaggaagcccttctaataatcccaggggaaaagagggtggcttggccaggtggctcgcaagtggaggtggcgagagtggggggactctggatgtagtttgaagacaacacattggacttgctgatggattcgatgttggtatgggacatagagaggaatcaagaaagactagggcaacttggccagggcaagtggacgtgtgcagttgccattgactgacatgaggaagtctgagggtggagctggtttggagaattaggagttcaattctggacaagttccatgtgagatgaatgttagacatataagtggaaatgccacgcagttaaatattggaggcaagagctctggagagggttctgtactggagatacaaattcgggagtcattagcatggagaaggtctttaatgcaatatttaccaacaaagaacatctggcctttagtccaattcaaagcagcacaaattatatggtagttgcctatcatttcatctcccccattctgttcgtgctcccatcaaaacttcctatgaccccaaactacacagccagacctcactccagggcctgagcagtcagagctgcaaggcaccccaaggggtacaagcacttcctgaaacaattctactctataacaatactggtactcaccaaggacaccttgtgtaaaataggaagccagttgtggggagcagtgaacatggagtcagaaaatctagaagaagaatcttggctctaccaatggtttgactctagctgtgtgaccttgggcaagtcactcaaactctctgtgctcagctctctcacatggtttatattgtgcagtaagtgacaaaatccatctcaacagcttagcacagcacctgggacatagtaaccgctcagtaaaaatcagcaaaatgactgttttgttgccattattattagcatttgacttaagatgaggataagggaacaaatcatttatttggaaggtaatcctagggggcactggttaaggagaggccaagtgataaagagaaagaaagaagccagtgaagggtgtgttctcaagccagttatcgctgtcagcaaatagagctgaactccaccagggcaccctgacatccagtgtagagtacacaccccagagttctcccacctgaggggtgagggagctgaggtatttatacaccaactcccaccaaccatgccatgagagctgggggtggatactactttctagctttggagaaagagatgcaattggaagtcggctggtgcatactgcagtggtaaggcccaaaggatgtggacagggcacacactggcacctgctgcagagtcatcattgcctatctggggcaattcacccagcttctctgagcctcagttttccatctataaaatggcaggcatcatatctgcttctcagagttggcatgaggatttcagaaaataatgtttgtcaaagcacctggcgtgatgcctgccacatggaatttcaatttcctttctccctttctcttctcctcattacgccctttccacatgaagggaaaacttacttgctcacaagccacacagaaaatgcctttcagaagggcactttgtgttttacaacattgttctctggctgcagagcactccttccatataatatactctcagatgtccataatgatcttgctaagtattcctttctggaaggaggaagtagaggtgctttgatagtgaggacggaggtttgtgcccccaaggtatgcttcatgtctgtggtcgctgtttttcgccccgaccatgtcaaggccccctatctccaaacaaattggtcaagatggagtcattcctaatctgatgacatccagcactgccatgtggtgtaagctgctgagctgctaacagagacactggtaagttgacccagaaaggagtcaatcccttcttacttccccctgcaaaaaaaaaaaaaagaaagaaaaagaaaaagaccaactcaaaaggcccctgcaggaaacaggcctgcccggtgcaacccaccagcccatacagcagaacagacgtgggcccaggagacaagtgcttatgtgtgagcaagaagccaccagaataccaacgagcagggaggtctccatgccaggaaacccccacaacggctatttgtttggtgtcctgggaaaactgagcaccaactgaggcctcacggaggcatccaacagccggaataaatctgaaagaagttgaccacgctgagacggaccaggcttggttactgacacacaaataagtccagttgattaataactactctctgtttagagttagcaacggtcccaaagactggcatcttgctgcatccaaagaggtgcttgctggcatggataaggcaataagaataaataaaattaagtggtttctttacacaggactttgctaagaatctcacatatggcatcttgttgatttttcttggcagccccaacacaaacatgatcatctccattttactggtaaaagaagcctgaagctcaaagggcttatcaataatttgatcatggtgatataaagccagtcaacaggtaagcctacacttacccacccatgaagtcagccttgaaagaatattttttttttaatctacagtgttttcatatacaagatctaatggaaaacaaagtgtatttattatgtttagaagccagaatagtggttaacattgaggtgaaatgaggggtaacacccaggaaggtgccagtataagggactttaagatattggccctgtactgcttcctggccttggtggtggtttcacgaaactcaccttgtgatagcaattcaccaaggtggacacttagtaaccagtgaattttctttaaaaaaaaaaaaaacgtagagacaaggtctggctatcttgcccaggttggtctcaaactcctggcctcaagtgatccttccacctcagccttccgaagtgctgggattacagccatgagccactgtgtccagccaactagtgaattttctatacttacattatactaatggaaggatgagaaaatcacggccagagggggccagctgtctgtttttgtaaataaagttttcctggagcagagccatttctgtgtcgatgtattgcctgtgattaataatccgatcctctgcagaaaaattttgctgatttctgtgtacactgttcagaacttggtttgagcacacattatatctagctttctgcttgcgtttttcgtaggcaaacatgtaaatgagtttgcagacttgaagaacacaacaaatgacatgaaggagaaagagctctatgttaccctgacacattcattaaagaagttatacggtcattaataaaaacacagatgatccaatgagaatgtaaataaggaaattaggataaactgaagaaaattaagagcaaagagaaagacaggtataacagaaatcatcttacttaaaattactaagatttggctgcaactttgactcagagtttcatggatacccaagcaaaattggtaagacactcaacccagacgctccaaatgccaaggaaccaagcagagcttcaaacttcctctccagaatccacagagcatccaagcctgtgcacacaactgaaagctggctgttcctgatttttttttaaaagcaccttttccccatttttcctgcaaaaaagcaactcattttttgctctgatgggcaaaaaaaccctcaggagcctaacttttgccaactgccatgtggcactgcccattcccatctgggctggctggcacagaccacagcgagcagaacagagggcccaggagggtcctcagatcgtggctacatcacaatgacctacttgggattagaacaacattttagagcataacagcgttttatgggtcataaatattgcacagatgttccttatttacacagactcgatagattattattgcaacattaccatgctaatatggtgattcctgttttcgaaactggcgggcaagaagcagggaaatgtaattaaacaagtatggtgcacattttaggaggttgttcagtaaaacaaaataaaaacacacactaaaactgctacctcttattcaattttattccacaactgactctcgatggcaagagttaaacttttcacaaaatagcattagctgggattggagaataataacttaaataacagcaatggcagtaacaaacagctagcattgaatgtgtgcttactacgtgttttatacatgcattaactcacttaatgctcagaacaaccttataacgcggatcttataactatgcccctttgacaaataaggaaactgaggcagaggtggccaagcaatttcccagagtcagaaatcttttctcagtggaaccagcatctgacttcaaagtccatgttctggtaataaccacacaacaagcaaagacttactgacagctttctgcaaaagcaaaggctactccgtgcggtcccatcctgggccactaaagcacacaacgatcaatgccccaacacataacatcacctctttgaagacaaagaatggaaggtcggtctccatggtccatcactctggaggcagcaaggagtcaagcttccaggatctggtctggggctgcctggctccccttcccttcagccacaccagtcagtcacccatggttccaaccacaccaaagggtttggcttttcatgatgacccgctggacagcagcttggctcaggctgctcttctgtctgctccccatctcactactcatagccaagcatcatttcctgccagaaaccatccctggctccagccaagtgaggctgctccttgcagcagcgtcttacacctaccatctccgtatggtgatagccaacatgcccatctgtctccccaaaccagacggtgagctccttgaggacagaaatgatctttcaggtatcccttgctggtgaatccacagtgaccaacccagagaaggaactcagcaaaatggtgaaccagaagaactggctaggaagagagcggagatagctgcaaggatgccctgctaggaactgtggcaatccttacaaaagtttgccctgaaacaatcagcatcctcttagcaatttttgagtctccaaaataaacatctgtggtcaacaatgaaatgcacagagtgctcactttttgacagtccgttctataacacaaatcttgcttggaggccagccacattcacccttaatcctaggtgtgatcacatgaaagtgttcacgtggtccacgcagtacaactgggaagtaaagaacaggctgggccaggcgcggtggctcgtgactgtaatcccagcactttgggaggccgaggggggcaaatcacgaggtcacgagatcaagaccatcctggctaacatggtgaaaccccgtctctactaaaaatataaaaaattagccaggcgtggtggtgggcgcctatagtcccagctactcaggaggctgtggcaggagaatggcgtgaacccaggaggcagagcttgcagtgagccgagatcatgccactgcactccagcctgggctacagagcgagactccttctcaaaaacaaaacaaaacaaaaaaaaaaacaggctgtatgtggaaggctgtggctcattcatacacattatttggatagttccgtggctcctgcactggactggttccctcaggggaaaaattatccaaagatatatacaccgacagcacatctatctcatgtgtgtgtctttgtgtgcatagaaagaagtggagaggagagggagatatgaacacatccgttcctcaacctctcctttacgaaatgtgttcctaaaaatgagttgcaaattgaatgtttaaaatttggactatacagatccttgcgtgctataagggtagagcagaagagggtatacatgggaggacgacttctaaaaaccatgaaattttacctttggtatatatgtttcattttcttaccccctgagtgtcatgcaatgtactgatgattatttgggattatttaaaatattaagaaataaattaagttacaaatgataaacttaattttggaaagtcctaccttaaattccaattatctcagcttactgaaaatacaattcatgcaaaggagaaaacgagtttgctgttagggacaaggatgtgctggcacagatatagcagaggattcggcactggcttccactccttcatgcagtctttcaacatttgtagagcacccagtacatgccaggtgctttctaggtagcaagcaagagagaattgcttctttaagtgctttctccccattacattcaaatgggagaagcaaactaagtaaataaccaaataaataaatacttggagatagctgataccattaacctattaacacacccaagcttatgtggacagaaagtgaaggaaagatatttgagctgagttggaaagaaggcacgtcccaagtagagggaacaactagagccaaggtcttgagggagacagaggtgttgactatacgagaagagaaaaaaaggccaaggtaactaacacagtgcccacaaaccttttctgtagagggctaaatagtagagactttagcctttgcagggcatacggtttctgttgcaactaccaaactgcaccattgcatgaaagcaaccataaataatatggaaatgaatgggcagggctctgctccaatataacatttttatgaatgttgaaatttgaatttcatagaatctttgagtactacaaaataccctccttttgattcactatctaccatttaaagatgtaaaaacctttcttagttcacaggccatacaaaaacaggcagcaggccagatctggcccatgggacacagttttctggctcctaggctaaactcagtcaagtaagctgatatggtttggctgtgtccccacacaaatctcatcttgaattgtagctctcataatccccatgtgtcatgggagggacccagtgggaggtaactgagtcatgggggtgggtttttcccgtgctgttctcatgatagtgaataagtctcacaagatctgatggttttagagaggccagttcatctgcacatacttttttttttttttttttgagactgagttttgctcttgtcacccaggctggagtgcaatggcgcaatgtcggctcactgcaacctccacctcctgggttcaagtgattctcctgcctcagcctcccaagtagctgggattacaggcgcctgccacaatcatgtctggctaattttttgtatttctaatagagatggggtttcaccatgttggtcaggctggtcttgaactcctgacctcaggtgatccacccgactcggcctcccaaagtgctgggattacaggcgtgagccaccacacccacccctgctaaacacactctcttgcctactgccatgtaagatgtgcctttgatccctttcaccttctgccatgattgtgaggcctcccagccatgtgagtccattaaacctctttttctttacaaattacctagtctcaggtattgcttcacagcagtatgagaacagactaacacataagtgaatggcagaagaggggataaaagacagtatcaggagctagaagcaacagtttcggcttggggctttattctacgtgcaagtggagcaatttaaaatgggagagatatggtctgacttacgtttttaaaaaattactttggcagttgagtggcaattctgatgatgtcatcaacttccttgaaaaaaatgtgtcaacagggaatggaacactatcctcttgatcaagcagtctggagcaaaccatcttcccctcaaaagctctacggggcaaggcatggtggctcacacctgtaatcccagctctttgggaggccgaggcaggcagatcacctgaggtcgggagttgaagaccagcctggctaacatggagaaacgtcatctctactaaaaatacaaaaattagctgggcatggtggcacgcacctgtaatcccagcactttgggaggccaaggcaggcagatcacctgaggtcaggagttcgagaccatcgtggccaacatggagaaaccctatctctaataaaaatacaaaaattagctgggtatggggtggtgcacacctgtaatcccagctactcgggaggctgaggcaggagaatcacttgaacccaggaggcagaagttgcagtgagtcgagattgtgccactgcactccaaccccgggcgacagagcaagactctgtctaaaaaaaaaaaaaaaaccctctatggatctgtagatttctctctgtatttgaatcactgaaggctttatttttctttaatgctgattgtctgtccacaattttaaagatttcctcattttcttccatcactaaacatggccttggagacacgatgtcttaggttacattttcaggatttcatgtgtgttctttcattttattttcctttcacaagtgaagtcatctgaccagtaaccaattgaagttaaatagtcaatactgtctgtacatctgacagactctatccttgcctcaaatgtattaccatgagtaccggcattttcacatttccattttctactcatttttataatgtaagaaaaaactggagaaaaattcaatcacagctgtacagataaggggggtaagagagaaaaactggcctcatggctggcagacatcagagtacaatggcttcaaatggttttgtaaagtccaaattcaacaccggggttataaatgaataataataaagaaaagtgtggtttctcccttcccatcaattctgccctatatgagaggaaaggctgtcagggacttggtccttttaggcttccctgtgtttctctgactacccctcctgaatcccagtttccagtgtcctgtcaagagcctgacttgacctgtttattggttcatagactgtgcctggcatcttgacattcaacttagtctagcagcctagctccagctaaccatgccccagcagagagggagtgccgtcatgttagtcaagtcagaaaagcctttactcttgacaggtttggacctcttaaaaatccaaaggcattcaacccttgttagcctggacaagatacaactctggctccctcaactgtcataagaaatagataatgacaacttcttagacatacagcaacaaagaaaggaagtcatgcatttcaaactctcttcaagacacttaataaattaaccaaggtaaataagtaaccagatcaaatctatcagaatttttcatctcccaatttcagtctcttagttaaatttcaacccatcctatgtccatagaagtgaagccttctgtaacaaggctctgaataatgcaaaaaaaaagaggtggggtgggagttaagatgtgattctgtgacagctatagtctaaaatggccccaatgatcttcacctcccagtactcacatccttatataatcccttccccttgaatgtggctagactagtgactagcttctaagcaacagagcatggtaaaggtgacgggatatcatttatgtgattaggctacataagatgatgacttctgtcctgctacagaagtagcaagaatatagcagattgtctcccttgctcaggaaatggggcaagcccacatatgttagaaaggtccatgtggcaagaaactgagggtggcttctggccaacagccccctcaaggagctaaaatgcttagtccagcagcctgcaagaaactcaatgctgccaacaactatatgaggttggaaacagatccttccctatggagccttcatatgagatcacacccctggccaacaccttgactacagccttatgacagatgttaaaagcaaagaactcagttaagctgtgctcagagactactgacccacagaaactgtgagacaataaatgtgtgttaagtggctaactttgtggtaattggtcacgcagcaacagttaactagtacagggtccaacttgtcgtttcagtttgaattgctcaagtcatcctaatccaggagtcacatgttgtcaagtctctgcacacctctcgctgcattatcataagctttcatgaatttaaaagaacagattagaggttgatttcttctaaagaaccactacagtaaaccagtctcaatccctttcttccagcaaagggacatcatcaattgccacatcttcccctttgatgcaaatgacaaagaggaaaatcaaaccatgtcattgccatctctgagtccaggagaaagagataatgacagcacctggcctgtcttgcctcacatcaggaatgcagtgagatggttctgagccatggactttcccagaccatttgaatgagactgacatcatgaggaagggggtatcctctggttgggaatcctctagtggctgtatcattattttctattaaagcccctattgcataggaattttttcccatgctgatatgaatctctcatggaaaataaaagttatttttaactatgagcctcaggctataaattcattctccctaaagagttaggatcaagcaaaatcaaagaagttagaggaaggagagaagaacacatcctggagtgacttggccacacctgcaaaccatgtgccctgccccacaactgtcctctgaatgctcttctgggacctcttccctctcccttttacctgtgcccctttttatgtatttcctcctacatgctcatcccaccgtgccttcattcaacctgctcctaagaaaacttgactttaagacagtaagagctttccaactagctaaggttgattcttcaattcaatgtactactccaaatacttcaatccagagttcattaggttgaaggcatcatgctaacccccacagcagacatgtgaacagctgtgtctgcaaagcctttaaaaatgatccacaaacttccctgccttcttccattatagaatggggccagagtgcgcaccccaggttcaaaacctaaaaagcaggtttcaggccttgccccaaccctcagttcttgtgcagccttgggttggtcctctaaaccatctaagatccagcttcctatctgcaaaagcatcagaagacttgttgaaagcaaggattaaaatggaatggtatgcctgaaaatactctaaaaagagtcactgcgattagggcaaacaatttcaccttttcttataactcaaagttatccataaaataatcggttatcgtactgggagcccacatctattttttctcctcctgacattatcattgtcatgactgccactacatcttcagtaaagcaataaggtgggacctttggggtcttccaaggagaaaagcatgcttggccctcatacctagcagctgcaactactgagttgattgagctttcatcactgctttttacatttatacctcctaattcaacactgggggttataaatgtagcaacagttaactaacacagggtccaaactgtcatttcaattcgaatttctcaagtcatcctaatccaagagtcacatgctgtcaactctctgcacaattctcactgtattatcataagctttcataaatttaaaaggataggttacaggttgatttcttctaaagaaccactaccgtaaaccaatatccctcctcttctctagtaatgaggtcatcaccatctttatttatcagcactgcaagcatgcctccctgaagcagccttctccctccttctaaaccttctgagcttagaaatcaaataaaaacttgctagaattgtaggtaaagtaagagctgctggccactgaaggagagactaagggctctcctctggaggaaaaaacaagagctttgtgtgtttaatatctctttggtggctcagaggctctttagcttctttctaggttccacgcagtgcattagaaggcaagtcttctatttacacaatgtctggtatatagttaccatttcctatttctatctaggatctcacctggtgcccacccaccggtgttgatgtgtatctgcatgtctaatacacaacagcaatgagaccatgggcattccactcttaaattaggaatttcccccgtatatatactcgatatatatacgggggaaattccttatttgatatacagaggaaattcctatttaagcatgatcatcatttccacactatttattcaccattttatatatgttacttcatgttatgctcacaaccatctaatgagataggcactattattcccatttgctaggcactattaatttccataaagaaatttaaagctcagagaggttaactgattttcccaaggatatagagagagtaagcatgatgattaagaatcccaacaagtctggcttcagagcccatccagatggcgatgaaaagatctccaacaatggctataagttcaagtcacattacaaatttttcctaatgaacagaagtgaactctaaaatccacccatcaaattgaaatttatcacgacacatgcgtgagttaacaattctccaaaaggtaataatattataaccaccactgctactatccctcaccaggtatttgacatgcatcctctgaaatcttcataaccccctgccagactggtagaattattcccattgacagcggggaatctgggctcaaaacatcacagtaatttgcccaaggatgcagactcagtaagtggcaagagctgggattttaattcagctctctctgactccaatgcctcttctctttccaacatgttgagtgacccaagatgagatatatttaagggcaaactagtcttcaacaatatagtcaatcttcacaattcagaagattcttgtgaatctttcgcagcttcgaaactgagacaatgctggtctggaaatgaacatagctgggtggaaaccaggtttgtccagttaacagctgcgtgactgagtatgtgcataacctcactaagactgcatttctttatagtaatgcaatttcacagggtcttgacgtggattaaatgggataatgtgtgacatatgtgcaggtatcaaggtctgtggcacacagagggtactttaagtattctttctttaattattatctttctttagaaaatataaatatgaattgagatttctgaatgacagatttaagataaaacagctactattatacaagacagaacacagaatcttcgattcaagattaaaattgctgaaagtatcctagaaatcactgaatattcatttattcaccaacattaagtgagccccgactatgtgtaggaattgcgctaggcatgggggatcagcagggaaaagaacaaaatacggatgattatggagcacaaattccagtagaaaaaagtcagaataaaatagaaaagagtctaaaataaaacacaaagataaacaagaagaccatttcagagagttaagtgttatggttggagacagcaaagctccctcttatttggctgagaggaaaactgatctccaaaccagagaagggatttgattggccaaagaccccacccaggattaatggtgtgtctttgttctctagaccagcgattctcaaattttcacatctatcagaatcacctgaaagggtttaaaaacacaaatttctgggtcccacgccagagttttttattcagtggatctgctatggagcccaaaactttgcatttctgaaaagttcccaggtgatgctgacactgctggtccaggggccacactttgaaaaccactgccattgaggaacacaaccataccagaaagtagtgaggcagaaagagcagaggacaagtaccctaacccctctcctcctgccataccatctcctaccagtgccaaactccatcactaaactcagtcaggaatcagaatgcaaaagagtcgaggtcatgtagcctcctggaacccagcgcagtacagagaagggctccattaacacaattccctccccttgccccttttcacattaaagggttcaaaacctcactgaggcttcccactagtcctagtctccaagtgcctcggcatcccttgtgagttctcttaacctcaaccccgccacatgaatagtccctttgttaaagcctcttgacacacaggagttgaattctgttttctgttaagatccggagagatacaccaccagatcccagacagttccactagtgggataatttccaaaactgacaaacagctcttctatttcttcctaaagtaacagctataaaatgcaggtcaaatatcagataatcttttttgctacacaaatacaaatcgtatatgcaattcgcaagcccttgcacaggctgtgcagcaagatcactctaaatacagcttgtgggcctgggatgagcattagagtgaccgactcatcctgatttgtctcaaacattcctgcgttttcaatgagcactgaaggtcctatgtcctaggaaccatctccatcctgggcaaacgaggacaattggtcaccccagccacgcactcttatgttttcttgcatttatgatgcctccactgaactcccagcaatagcactataaccaaggatggctagtatttatggagcactttccatgagcctggctccttgctaagcatttgacatacctcacctcattaatttctcacaaccatcctacaagcaagttactacaatttgcctcatttcacagatgataaaatcgaggctcaaagggtttaagtagcttgttcaggtcacacatacagcttataaattagcacaggcttaacttgagcccacagtctgagatcagagtctgcagtcttttttttttttttttttttgagatggagtttcactcttgttgcccaggctggagtgcaatggcacaatctctgctcaccacaacctccacctcccgggttcaagggattctcctgcctcaacctcctgagtagctgggattacaggcatgcgccaccagacacggctaattttgtatttttagtagagacgggggtttctccatgttggtcacggctggtctcgaactcccgacctcaggtgatccgccggagagcctgcactcttcaccaccacatggttcatgacagagcagatggactcacctgccccagatctgattccataaggaaggaagattcagccaagaactaccaaaagggcatgttagaaaccaagcattaacactgcagtcacagagcggaaacttagaggggatctacatgttcttcattttaaggcacacaatgaaaaagtcaaccgcaaggtgtttggtgcctttggaaaatcagagataaaattatgcaggcccttatatctcagaatcagagattcttgcagcaaaatctgtggcattcaacacctgatgcatcctacaaatgcaaaagcagtcccatctgatgccttggcttcgaactcttatttgtaaaactggaataatgatcacctgtcttaaatccacaaggtggttgtcctgtggagaaagtaaactcaactaactctgtccagccagaagtgttttcctaaactgctgtgcttgcgggagccccagaggtccaaagtccacagtgtggggtgatccctggggtttggtatacggcaccttcaggtgctgggtccccagtgtgaaatcaggggcagctatatctaggggctcaacctctgttccaggacaggtgagggtccttccctcagaattacctgcttgtatgactgggatagttgagactcacttgttggggagatggagcttccttctgggaaagacagtctctctctcctgtacttcttattcccataaaaatcttctaacattcgacatcacatggtgattaagaacctggactctgaatgagacgaccacagtgtgattgtgaccaagcccttgaacctccataaaaccaattatcttatctgatacatgggattgctgtgtctgcctcatgggatcattatgagaattaaatgcagtcttagaatttccccaaagacatgctcattgaaaattctgaacaaaggctttccacccagtaatttcaaacaggacctaattttctccataagtatgaattttgcacagcacatggcacaaagtaagccagacagagagaacataaagtaatgcccaagaacacagaatctagccttgaattcctctggctcaagtcaagttcccacactgactagctgtgtgacctagggcttgctacttaaccactctgttcctcagttttgatgatcattatacctacatcataacagtgttatgaaaactcaaggagtgataattagtaaaacccttgaaaagtatctggcccattacaagtatttaaagcatgtaataatgttagtgcttcctatttggtagtcatttcatctcctgcatttattcctccgattttcagtttagatccttcatattcagcagaccctgctgcacctgtgattttcataactcttgaatctagtccctgttattatcgcccatcatccatcatttcaccatatgatttttccccttcttgcattttctgcttttcattccaacttgagccaaatgctcttctcctctgtatactcttttgggtttagaaaccttcctcccaggaaagtgaaaatccctgctgtcatattcgaatgtggacagttctaatggagtcactgtttgaaatgaacaatcctggaaacaggttgctttatctcctggacctggggatttcaaaacttattccttttgaacaaccaaaccatgagtagtgtcaaataacaaaactgatccattgggaaaatatattttaatatatttaatctttatcaaagatatccaatgatttggttttcagaacataaaataaaaatcctaaagtcagaggcctagaagtttagtctttaagaaacatagaaatcatctggacatttcacagatgggaaagtgatgcccaagttcacagcatctctaaacattgaaaagactgcgcaacattattctttgagtcaaatgtgcctttctgacgcctcaggcaaacctaaggccaaaggctgtcctatgaaagaatctctgctatttctctgggatgcgaggaagtctcctccatggagatgccaggaaagagaaagagacggaggtgtgacaagggaatagaactgatggctaagaaggtcccctccacgggccccatgcactcctgttcaaatgtctccctgtgtctgtgataaagttctctatttcccttcttctgcatgatgcaggggtgttaggattcccaagagaaatcctttacaaactcggaaataaggccttccatatagaaaataaaacctaaatttgtcttgaaaagatgacagaagcaaactgtacatatatttaaaattcctattatctgtaccttattaataaatcttaaatttcaagaacatctcttggagctgtgactgtgccactgcactccagccgggcaacagaacaagactccgggctctgactgtgccactgcactccagcctggcaacagagcgagaccccgggctctgactgtgccactgcactccaacctggcaacagagcgagactccgggctctgactgtgccactgcactccaacctggcaacagagcgagaccccgggctctgactgtgccactgcactccagcctggcaacagagcgagaccctgggctctgactgtgccactgcactccagcctggcaacagagcgagaccctgggctctgactgtgccactgcactccagcctggcaacagagcgagaccctgggctctgactgtgccactgcactccagcctggcaacagagcgagaccctgggctctgactgtgccactgcactccagcctggcaacagagcgagaccctgggctctgactgtgccactgcactccagcctggcaacagagagagaccctgggctctgactgtgccactgcactccagcctggcaacagagcgagaccctgggctctgactgtgccactgcactccagcctggcaacagagcgagaccctgggctctgactgtgccactgcactccagcctggcaacagagagagaccctgggctctgactgtgccactgcactccagcctggcaacagagtgagaccctgggctctgactgtgccactgcactctagcctggcaacagagcgagaccctgggctctgactgtgccactgcactccagcctggcaacagagcgagaccctgggctctgactgtgccactgtactctagcctggcaacagatcaagaccctgagatatgattgcacagcagcacaatcatagctcactgcagccgcaaacagacatcactttttaaaggaataactgaaatgcagaaatattacaaagagaagtgcaattaacacctaggttcttctccaccaagaattatcaaccaattttaacaaattttcttaaagtatgttctccttttcaaaagcaacagaatatcacggacaaaggcaaaatgccctttatccaccatcctagttccatttttcccatacctcttctaaagagtgtagccttccattctgctttcaatgctgacataaacttacatagtttgattattaatacatatttgattgatgtatccattaaattacccctgttttctttccacagaagaacatgtggatttgcagatgctgactttggttcatgtaccagaaaatcctgatatttgtaaatagtccttaaatagatgcccagattattagtatgaggtcatccaacatgctgatatagaagggaagctgcatagcaaaaattgggatgcttctatgtacaagcaggattctgctagtttgaagaggtcactagacctcattagtaaaccatgaggccagaaaaagccagcccaagatatactacatctgcttcagctctgtgtagtcaccgcactcccataatatcctgtatttttggctaaataaataaaaaatgtataagtttgggagcacatacaaggtccttgccagataatctgtaacccatctgcaatgacgccattggtgtcagaagtgggacagacatgaagagcccaccacaatggccacattttggatagggatcagaatatcaaagtaggacacaatgagtaaaacatgcctaaaacatgagaatttgcggggagctgagtctagtggaatttatccatggttcttctcccttcatccatttggacctgacatatagtgaaagatggctgggacaaaggtagttagcacaaggcaaaattcctggaaccttttgtgtgagccaaagcagtggttagaactaaggatctccagaaaagatgaaaccccagaaggaggaaatatctgaagtttgagccaaaaatctatggatcacaaaaggatgctctcaaattagacatctgaaaaggaaacctggaatgggaaagataccaaagacccctagaatcccaggtggaacaggtggtcagcagctttccagggacaaatgataactgctgaggctttggaagtatgaggaaatgggaatggaataaagaaatgcttcaatgctcatcaagccaactctcaggcagaacaattgcaatacagagagatttacacaaagacatttaaatatatgttaaatatttcgtatgtgggaagaggaaaagataataaggataagaagtctgacttcatcaagtcaaccttcaataaaaaagtgacccatcaggaacctggccccgttacagttttaaactaaaaaattctgttttaaaatatgtgtatactttctaaaggcagcagtaactttgaaatttgttcaaattaattgcacttttccaacaaaaatggtgttcagagcatcaagtcccagaaatattttcctacttggaacagggatcttccaagaggaaaacttaaagaacttcattgagatggaaaattcaccttgggaagtatacccagaaaaagtttataaaacttctgctgaagcaagggtgttgtagtatctggatttggttgggtgtttgcgtgattaagctgggcatctcacaagttgaaaaccatacatttcctcttttccagtaggttccactgctccttagtaaacctaataaaaatgatctcaaaactgcaactgaagtgttagacagctggcctctacttcatcccagacaattttgtttaggggaagataaacaccctgaactggagccagctgagacacagggaggaagctggctttgtgcctggcttctttaaggctagaagctctgggaaaataactaatcattcctgacacccaccccgcaaccctgatttgagactgtttagaatcttggctcaaagttgtgatttctgagctgaaagccactcccccattccaatacacacactttctatttaaaaaggtgaaaaaataatgcaaaggttaagagatggtaaatggacaatcttaggcagaggaaagattcactgacaaagaaaaatgtaacagtcaaaacatccaaagctctggatctgaaaagagaagaaagactggacactgaaatggctttgagctcaaagctgcaacagcagagcagaacaagttccttgacccaggcctgttaagtgcatttgtgcaggttccacacaacaacaggcagcagccctgacctagacacctagaacatggtacccccacctccctcacacccaaccttgcactgccagatgtagcaagactgaaggggacaggtaataaatgagaaactgctcaaaaacccaagcccctgaaagtggaggccaaacacttccccaaggcagatgaagggtgaactcaaggtgtcttagagcactcgttcccagggtcaccttgtagaaatgactcaaaaggacttagggttggaaccatcatacattggtgcctcttctaccaaaatacagatactgcctagacaagaacaatggggatctttggaatcaccaccacccccgaatgaaacaattaaactgtaaaaaccagtaaattcttgaagcacatctccaccagaagtccaatgtctggtcagcccatttagattctgacaaaacatccttccttcactgcaggatctcctggggccctaaacacagttaccttgaaaagaatattgtgacagtttcttctgtgatgactgtactactgccacaacaaccaaaaccaagagttcaggcatgacgtgtttcaatccatataataacttacgtgtttacatcagactttttaattgctataacttatcatattctctatgttagttttatggagcccatttttaaacctctggaaatgggttagaaaggtctaaaataagcgccaattttaaaaactgggatatgtacatgtaataaaaatattaagtttcagctaaattatatcatagccctaatctattggtgttttttataaattggtttttgtggaacttagataccagtgtaaaaattgtagtcttacaaaaacacagtcgtacttcaattttgggggtaaaggttgaaaagttttctgatggatcttcatattaattcacttctactttctgacatgcctaattaacttctacaaaacttaaactaaatcccttctgagacactaaatctctctattctaaggcctttaaagagtgaaagcctgacactgaactggcattagtgcccccaaaataaaaagaattaaaagatctgaacacacttcaaaggttatatttgtatttttctccaagaaacaaggtttcccacacttgtgtgtgacttcaggttcctgtggtgggcagctcctgaaatggttcccaatgacccccacttcctggcattcatgcctgtgatggttaatcctatgtgtcaactcggctgggctaacagatgcccagctagctggtaagatgttatttctgggtgtgtgtgtgagggtgtttctggaagagatcagcatttgcactggtcaactgagtaaagcagatggccctccccaatgtgggtgggcatcctccaatccactgggggcccgaacagaacaaaaaggtagagaagggcgattctgctctcttggcttgagctgggacatccatcctctccttcccttgggcatcagtgctcctggttcttgggtgttcagactcaagtcagagcctacaccatcaacccccaaattctcaggccttcggacttacatcatcaactttcctgggactccagcttgcagactgtgggacttctcggcctctaaacctgcatgagccaattcctataagaaatgaatcaatctctctctctctctctctctctctctctctgcccccacctccctcccttcctctctctccctgtcatatatatatagaaagagagggagagagagggagagagggatatatatatatatacacccacattttttttttcaaacagagtttcactcttgtctcccgggcaggagtgcaatggcatagcctcagctcactgcaacctccacctcccaggttcaaacgattctcctgcctcagtctcccaagtagctgggactacaggcacacaccatcatgcccagctaattctgcatttttagtaaagacaaggtttcaccatgttggccaggttggtctcgaactactaacctcaggtgatccgcccacctcggcttcccaaagtgttggaattacaagcgtgagccaccacccccagccaatatataatatacatttaaaatgtgatatataatatatatgccctattatatattctaatatatatagcctattggttctgtttctctgcagaactctaagacaacttccttgtgcaattccttccccttgagtgtgagctgaacctagtgacttgcttctgacagaatatgacaaagtgatgtgatgtcccttcccaaattaggttacaaaggactgtgacttccatcttgctcacactctctccggctctctcacttgctcactctgacaaagccagctgccacactgtgagctgtctgatgaagtggcctgtgtggcaaggaactgagcgtggcctctagcaaacagctcatgagagacggaggtcctcaagccaagagcccgtgagtaagtgaatcccgccaacagccacggaagtgaacctggaagcagacccttccccattcaagctgaactgactgcagcctgtgaggggccctgagccacacgacccagctatgccacacagattcctgagccaaagaaatagtgagacgataaagccactgcattgggggagtgacttgttattaacagacaattaatatagctcctttagaacaggagttgggcctacttttccttttcagaaagttggtgcccaagaaagaaacatggacagccgggacctgactctggacctgacactgggcccaggcacttggaggccaattccaagatgctaaagaaaaaaagacacggtgacctcagcttctcagtaatactcactgaaacacataatatggcaatgtggcaaaattctttttaattagattaatgagttatcctattcaaactaactttacaaaatcaaagagataaacaatcataaatgcatgctgtttaaaacctctttcttttctatccctaatgccaccagctgttcccattttaccctgctgtatgccagtgttcaaacaaaacaccaaaaatatgcacccagattccgatgttcccacaacaaagggactagggctctttaaataataactactattataataatataataaataataacaaaccaagacgtgggcctgaaaatccttgttgtcactggaaaataaggactctctcaaggaggtctggaggtggtaaataagaacctggtttgaaggagcttccaatagccaaactgatcacttaagggggacacgcacaaaagcataattacagtcaatcagaggaagtcaagatcacccaaggccactagtacctgtgatgatccaacatgaagcactgttttttaaaagtcctgcttgctgatgtgaacccattcattcatgctcagttacaaagagacaaatgcgtgatccctaagggatgactacataaccacccaccaggaggtcagggaggaccaagagaaatgggtttgtggtcttgtgtctgctcctagaaccaacaggataaaagggggagtaaagcaaaatgaggggtggtctgagaagaaacaggtttccaaggtcctgggaagcaggagctggaacataactgtggaacatgtagtcggcagcactgcattcttccacagaaaaggataagctccacgacgctaagaaagttagaagtttgcaaacatcttccttcttttttttttttccgagacacagtcttgttctttcacccaggcagaagtacagtggcatgatctcagttccctgcaacctccaccacctgggttcaagcgattctcatccctcagccacccaagtagctgggattacaggcacatgctaccacacccggctaatttttgtatttatagtagagctggcatttcgtcatgttgaccaggctggtcttgaactcctggcctcaagtgatccatccacctcggcctcccaaagtgctaggattacaggcgtgagccaccactcgcccggccgtggtttgcaaacatcttttaagagcagcgcttgaactattagcgtgaagttcctcctgggtgttgatggaagccccctacaaaggcagagacaaagctggtgctgagctgttttctcctctgttcatcaaaccaaaggcgcaaaaaaaacaaaacaaaacaaaacaaaaaacgttgcatctgctcctgatccaaggcacttctactcttctgttaaatctctacatccttagcttaatgagaaaagaaatgaatgaatgatctattctctcccccacaaatccataccctaccaaaatattcagggtaaaagttattcgtgtctttaattttaatagacattgccaaattagcactcagaaaggctgtttcaattttcactactcaaaaatgaacaaagctacctaattgctcagatccttgtcaagacttgatagtcttaaacttttgcatttttgccaaattgatgaggggaaaaaatgctacttcatagatttaattcacagtctaaagagcctttcaaagagcgagagataatgctttgcaaattgctaatacaacaaactattttggaaactagcaagagataagtcatagtaacgccatttccttggtgcctgttttctgccggggaccaggcttgacaatttacaggtattatctccagctcttgcagcaatgaggcatcagtagccccattttacagatgcagaaaaaaagatgcagagcactgaagtaacttatcaaggccacatcacaagtgcattagggagctgagatttacacataagtctaacttcacaaaggcccgtggtcaaataaaagttttaacagctttagtccataaaatttcatccatcatcagggtactattctataccttttaggaaatgcagagttacacgaccatcaccaccttccagtttccaagtcaagaaagttagaggtttgcaaacatctcttgagagcagcatataaactgttctctcaggctcgcttcctataaacccctgctccatgcccaaccctaggcaacaactggtctgctgtctgtctccatagatctgccttatctgtgcatctcataaaatatacagtctcttacatccagcttcttttgtttagcataatgttctcgaggcccatccatggcgtagcctgtatcagcagttcattcctttttattcctagtcatattcccttggagggatgatggacatctggattgttttcaggttttggcttctgtgaataatgctgctacaaacattcatgctcgtgtctttctgtggacatatgttttcatttctgttgggtagattcctagaagtggaattgctggattttatggggagtgtctgtttaactttttaaagaaactgccaaactgtttaccaaagtgactccaccattttttattccctccagcatcaaacaaaaattgtcaactgaatattcaagaaatgtgagactttgcatctcttccacttatgctccaggggacgtgtttgtgtgtcacacgcactttagcagcctggcttcagtgtgagaaaaaattaagtctgccacactgggggactgcttcaatttccaggtgacttaccagtctgaaggtgcatctgatggggtttctgcacagcccttccgtgtggatatacctaggaaggactaactgaaataatgctcacatttgaagataaaataggccctaatgggccgggtgcggtggctcacacctggaatcccagcactttgggaggtcgaggcgggaggatcacaagatcgagggattgagaccatcctggctaacacggtgaaactctgtctctactaaaaatacaaaaattacctgggcatggtggcgtgcacctatggtcccagctattcgggaggctgagggaggagaattgcttgaacccaagaaatggaggttgcagtgagctgagatcacgccaccgtgctccagcccggcgacagagcagtgagactctgtctaaaaaaaaaaacaggccctaatgatcaccatgcctcactgacacctctttccctgtcccgctgtattgacacatcgattcccatttttcatggttgacttctgttacgtccctttggaatgtatatctagaatcctcactgggtccctctgtatcctctttagcacctgcaactcttaccaatagataataaataaatgccattatcctgctcatttctgcctctactggcaaataaaagtgtccagcaggaccatatgaaatgctgaaacccatgatcctaaccggtcaccctaacccacctggacacacacactattgatgaacccctgtccctgtggctgtatctgatttttgttaacccattgaaaatatgtggctttcttcctctccatactaatctgaatccattctgtaagatttcatgagacacgctaactgctttctaatatctatgtggtattgcctcctggacccaattctgtaaggtgtttgcaaatgctattatacttgtccgacatggtttgttctcaataatctcagagctttttaatttatttattggaatgccatggcccttgtttgttttcttattctttgcttgtttatcaagtgcacaaagtatctttttcccccacagccccagagtgctgtgcagttgatctccaggttagggaagagcagaggacagagccgaaaagcaaggaaggctgcacacgggagagtgtaggaagggaaacagaatgcatccaaatgttgtgtcctgacgcaatatgtagccatttgtggtttatcaacacttctaagtcagagagtaaaatatgcctaaaagtcaacattccctatttaaacccttgaatggccagatttactagtgtcatctgttggcaaatttcattggcaatctctttgtaaaagcagttgcagggaatcaagcccctgaaaagaggaaaaggaggaaaactgggtgggcatggtggctcacacctgcaatcccagcactttgggaggccgaggtaggcacatcacctgaggtcaggagttcaagaccagctggccaacatggtgaaaccccgtctctataaaaatacaaaaattagtcaggtatggtggcacacactcataatcccagctacttgggaggcggaggcaggagaattgcttgaacccaggaggcagaggttgcggtgagccaagactgcaccactgcactccagcctgggcaacagagtaagactgatctcaaaaaaaaaaaaggaaactaaaaatcatcaccaaacccagccatctcatggccagttcactatttagcataagactgatgccccacccgccttggcctgtgcacatacacctgtgctgaggtcagtaacagacaaggctcctcttgggacaaagtgcctattatgtaccaggcactcttccattcactctgcatattgcatcttatttggttaccacaaagtccagcgagacagctataattatcctcactttacaaatgagaagctggggagctgagaaggtaaatgacttgcccaagccggcataggtagaaagaagcagaggcgggatttaaactgaggacttcagatgccaaagctcatactcttttctccaaaccaggctgcctcctgagttaaattcccctgcgcccaccctcgcccccccattatagctgccgtgagactctaccatctcttcaccatcatcagtaaatatttatcaaggaccaccgcctacacagcattgctcttgtttccacagcaacacactgtcacggagtcaggggagtatcctgtgcttgaaagagtgatgctgtcatgtcctctgatcgtggctgtgaaaggtgacagctatacgactacatggaataccatctcagctggcagcctgacaccttcaagagctgtgctgagtacaagcaagaagaaattaagttgagtagaaagagagtcggttgtaacccaagaatatggtctgcttttactatgtgtttgcgattgttgctggaacagaatttaagccacgtttgcacattaattgttcttttattaggaaacaaatcaagcaatccatgacagaaagtaaaattcgactgtactgctaacagttccccagaggtatccaacggtgattattgagttaaatgactacattgctaacaattgcaattgcaagtcagtcccctataagatacatttttgctctcaatatgtggattctgaaacccactagtaaatgaattcattatccccttattcatttaactgtctctctcttcccccatcccaaatcatgttttgccacattgttaagaggctgtttctaaaggttttttgtttgtttgatttttactatcattccttccaaaaaccgtcgtggctcaagaaatatgtcttagagtaaggaaaaaggaaattgccttttgatgacaagcttccgccccgacttttggacactgagaccaacatgttacagcaaaacatattagcccaactatgttatggatgtaaccttataaattgaaattgctttcaagattgggaattttcagatcaaaagaacatggaaaacacactacttagttttaaaatgtatttgtccaaacttgccaaaagttttaaataaaatactttaaaggaaatcaagttattgtcatatttatactagatttgaaatactaacaatttctgaatttaggaataaaataagataagtccatttttaagtcaacatttacagtattcttgttttgacaaatacagatgttcatgaggaaccctggggaaaaaaaatctaatttagatggtctagttgccgttaaactggaaaggagaggacagatatatacagaaaatccccatttctacaaatgtgtgaggcttagaatgcaccagttctccaatacaagctaatcccattcgtttaaggagcccctggcacaaaggcacccacttgctaaatatatgctatatcgcaggtttgcagaaaccaccctgcccaggtagacccaaaagaaccacagatttcttcccaaaccatattccaggatttcttttctttctcctgcattctaaagagcaaacaaagaaaaggtgctcgctcctcacacttctctaaatgttttaacaaaaggctgctgaataaacacattactcatttaaaaattgaaaagaagttctattcctgatatgaaagcaaccagatttgcattttaatagttgtgggcgagcgccacctggcgggagcatccggaacgggcggcgttcagcactggacagcttcccgagccggtacgggttttaccgcttgctacccaagaacgattcgagacccgtgatggaatatttttgatcctgtttctgccgcgggaacgtgagtggtattaatgtgtggttggccggtcatgccttagaggatataaaatctgagtcacgaatcatgcctggatccccaggactgccccgggcatcctccctagtacccctccctcccctagcacacctaacacaccccccaaaatgaggaaaacaagaattgtgcaccatctttagaatggtgctgtagctgtccctcttctctcacttgctaatccaacctttcagcttcacacacctcaaaaggagtgtcttcgtcacccaacttcccagccagggaaacaggctgtcccttcacagaagtcgcctattccgcttccattttagtaccaagcaaggaaggctctaaagcatttccaacggaatgtccttccagcggcccttaacctcagacgcagcttgtgcaaagacgctgtacctccccacaggttcgttcttttgctctttctttcttcctttccttctttcggtgaaataataaatgggcacagctgttgcttagcgatccgaaaccagcctgttcctgcgtcccacgggctgatctcagcctgtccccgcaatcccagccacctcaggccggcgtggttacaccaaaagcaatcggtgctaagaaactttaaggtgattttgaacttggaagtacacctgcagcactcccttctcttccctccgccgctactcttgggggggggggggctcgggggtggaagctgcctgcggtggggcttggtgatgtgtaagaccctggactgtggtgccctccagcacccgccaacgtgcctttaggagcacggcaggcaccacccccccgcccccgctccccctactctggggaactacctctgctcaccgccttcccgtggccaaacccaaatatgagttccccgaacttttcaggagcggacgcgctcacgggtcaaatccactcccctccaagggccttaacacgggcgcccagctacctcggagaaaagccagcgggtagggcggaggtattgctctcggtcatcaacgcaaacatcccctcgggtgcctacagcggcctgcttaggggagcagcgtgttcagagcaaatggagagcttcctgtatctccgaggaaaaaagaaaagccgccgccccggcagcctcggcctgctggggacctgtcctccccactaaaagcgcgcgctgcccgaggagctgcccgggagagaacgctccaccccgggcgtcggtgccgctcctcgtctcgccgccccaaacactcaagtggcagattccgacaagtgggaggcagcaagtggaaatattcgcaacaaccgcggaaagttactccagcccggggggccggcaggaaactgaagcggggaacttcgccaaacgcgggctgccgagggacgcgaggggccgggctcgctggccggggcgcgcggggacactgcttcccgcgcctgcaagctgagacccgggttccggccatggggacccgcgcccccgcgagcccacacaactttctcctccgagggccccgcggctgggggcccgcgcgcatccaggagggagcggggagcccaggggagccgggcgggcgcactcacctgcggcgctctgagcccgggcgccgggcagtggcggcagctgcagcctcaggagcaggctgagggcgagcgcggcgaggctcgccatccgggcggcggcgggcagctcagccccttcccgcgggggccggggccgggactggggcgggcgcggggtggccccgcatcgccggcgcggccgctggctgtgcgcgcggctggctccgctcgggctcccggagccggcgctcctgcgttccaagccgaggcgcggcgcgaactgaggcgggaggctgggcgggggcgggacgcggggggcggggggcggtgtcccccgagtcctaacgccgccgccgttgccgccgccgccgccgccgccgcccgcccgggcgctccgcctcggccgtgcacacaccctcacgcgcacgcccgcgcctggcacacgcccgcggctggcacacgcgggctcccccgcgcaccctctccggggccgaccagctcgggccgctggcacagtcacgcgcgtccacacatcacccccgcacccacacgccgggcagggtcctcgcctcttcgccccgcgccgcgccgcgcagccaagcatcgtctgccctgtgggggcgcaggtacgggggcggtgcggggaggaggaagctgcagcagccgtttgaactcggggtggggaacaggtgaatgggggttcggtggcgagaagagggagggagggagcagccctcgcaactcaagataaggggccaggtgaattgcgaaagcgggtgggggcgtctgcccaaagctggggcaggcggctgctggccagggtctcgggcacaccctgagatgagaatttcatctaagagcgcgcgcgcgcacacacacacaacccactcacactcttctgggcgcatcgctgaccgcgccacaatcgtcgtccccctcaattagccgcccaccccaccttcttcttcacccacatctctctcttgtccccaccaccacgcggaagggggcgcagaaggggcatgaggcatccccccaccccctacaatttttccctggcagccttccctttccttttctagggagacagaaccttgtagctttttcccttttcttctcggtcttaacaaagacctggttggggctgaaagcctaaaaccatagatcagggttggagctgtccctggcagcccacggcccacagcctggctctctgctgtcctgggaggcagctggtacctgagtcttggctgggggtctgagatgtaaaagccaggggcagggatacccagaaatgcttaagggattcacactttgtgaacactttgctacctggccaaagccctccttcttctgtgtcagcacagccccccacccccatccttgttggggtaccagggactggactggggagactgtaagtgaattgtgaaaatcaagcatggcagggtttccaaaagtggggagccccaggctctggacccaagttggcatggcagagaacacagggcgtcactctgtcagtccccagttcccagtccccactaggtaaagtggcccagttccctggcatggaagcccaatttacaatcccaggcaaattcttccacccctctccggaccccgactcccaccaccaccaccatgaccgtgaccactttcaaaagctgacgtgcttggactagcctgttggaccagccagtgcctcccacacttgcctggtcaaagaactaccaggaagatttctccaagtcctgcttcccagacccctgctggggagagtggaatttggcaggcctgtcgggggtggcctgggagttgaaccttttacaagctgctttggagattaataattctaccaatatttatggtgcatttaattgtgtgccttactctgtgctgttctctggggataccacaatgctatagcccttagggacaattggaatggaaagatcccttctgctcagagctgagcttccagctgtttgctccatcactcactcattctaaccctgccttgggcagatgagcagttaggaagtgtgcgaggagaggcctgacccaagaccaccacaagcgaccccagtcatggcagatcccaggggatgacccgggtggggagatttctaagccactaaagagcttggtgtcacacttgtaacttgttgccactttcttgggctcctgccaattcatcccctctctcaagctttctggaaaactataaaatagcagttctcacagcatcctcagagcaacgccctttggcacccccctgcactcctgctttagggatgtgatatcactgcagacaaatcccccaggtctgaatggggttcatgtggccccgaggggaaaaaaaaaattcagtagtcactgagctggtggagtgggacctgatcctgcaccaggacttacctgcccaggtgcaccgtggtcatgaaccgtgaccctctgtgctttctaaacctccctctactccgagaaactgccccctctccttcagtagcacgtgctgccacctgctgcccggccaggctctggcacccacagcactgccacgcttttgcaccggccagtccctctgcctggaagccctgcactgtatcatctccctgggaaactcacactagcccttagggcttccctttggaactttggccagcgggcccttcctgctcaaggcatgttccccagcgcaggtcactgtggtggtgctttttacattgtggaaatgttgtctcctcttcatgtgttctacaagacttgagttgccaaagggaacctggacacttaccacagggctgctaggagatgggggtgtgggggtggagagagagggctggcacagggctgaagatgccttacacaaagcttccagctagctggcttctcaggggagggaactaatggaaagttacagcatcatctcccaccctcctgcacagggagccctctttcccctctgaccccatcagcccagggagctgggacatgaccaagatttgcttggctaggggctgggcccagcattgcatcagtgctgaaggaaggaggcagggtgagctttgtaagagatggcattctgccctacaaactcttttagttatgctcagacagcaggcctcttatctttggactgtgtccttaaccccatgaaacctttggcgagacctctccgtgtgtcagtttccatatctgcccagtggcttccctttcagttgtgtcagggaccaagacaggagtgtccagacatttcagctacagatctctctgtcgagcagttttaggggaaacctgaaacttggggcatcctttcaacaagtgtgctggccttttgatgtgtgtcagggatcttagggctgtgggtttgcagcctaaacaacagacatggtaactgccatcatgtagcttacaatctggtggaggagactggacaaagagaaaggggtaacaaccccagagctggtccccatctccccagccctgcctcgcccccagcggtcagccctccagtggggagcagagcaccagggggaagacatctgctggggccacgtgccttactaattagatttccaaaccatgtatctagtagagtgtattctatgtttaaagtatcaaataaagtccagtgaggaaagtctagtgatgtagctattgtttgatccccatcttacacatgaggacactgaagctcaagaagggcaaagactctccatgtaggaagggcgggaaggttcacttcctgtgttgggggtggctgctccattggagcctgtcttcttgctgtggcacagatagccactagtcatttaaagttcaaatttagcatttcagtgcttggccacaccgcatttcaagtactcagtagccacaggtggccagtggctgctgtatcagacagtgcagatacagaacatttccaacatcatggagaattctattagtgctgctctaaaacagaggtcaccaaacctctaccacatctggcccactgcctgtttttataaataaagttttattgtgccacatccatgcttattcatttacatactgcctatgtctgctttttgcagaaagttctactggacagcactgctctagagcagaggttagcaaactccacccatgggccaaatctggaccactgcctatttttataaagttttatcgaaacacaaacccctgtattcatttacatattgcctacggccgctctctgaaatatagcagcagaggtgagtgattgtgacaaagatagtctggcccacaaagcttaaaatatttactgtcttgcccttcatagaaagtttgccaaccctttctttagaggaagtcttacagcacaatttgacaattattgatctaaaactcattctcaaagtgtggtttctgaaccaatagcatcagcctcacctgggaacgtgttagaaatacaagttcttgggtcccaccccaggcctgctgaatcagaaacgctggaggtggggcctgggctctcatttcaccagccttccaggtgattctcatgcatgttcaagttggaaaccactgttccaaaacacagagcaaatgccaacaagtgactggtacggtgagggtgcgaatgggctcctgtgggtaacagaagagtttggaaagatgccaagagagtgatagcccatctgctgcctggtccctcagcagcaaaacctttgacagccgttccacggaggctgtgccaaccaggggaggaccctgtaccagcccccggcgccatgctcaggccccactgccatcggccccgccctcccacggagttgtcagcacatttggagctgcctccacacataaattcatggaccagctgtctcttttaatctggttgcaagatgaaaccattaatagatgtcagacacattggcaatgatctcttcattaataatttcctcctttctgaggaaaaagatattagtaacaagccaccatcaataattcaaaaatacaagttaacctttctattagcagagtgactgtgcacacaccgcagatgctttcagagccagtagttctggtttgagtaatgttttgatggcaggaatattaacatgcattaatgctgtctgtcaagatgtgcaaatataaataacccaaatgcaacttagaaatcttaagtattttcaggtttaacctcatgatccaaccattttttctgtttaaaaaaaagcatgtagtatccaataatatcactccgttcaaaatcaggactttgtaacggaatccatttccagtttgaggtccttgtggttagaaagatttccctaaagctttaccgatactgccgattgatagtttctccctccaaagttggatctgcctcctggggaagtaacagccgggatgcccttccaggtgaccttcgtttggagattgggtgtgctccaggtaagcatactcaatttcttaaaacccttcccattcctcttctgatagattttcaggcccacggcacctggttcctcttctcagccatgctccattttgataacatccctcttctggggaggccttgcacctgcctgcattctccacacctccatttaccacccaagtgaccacacactcatcactttccctctccaaatgtgtttccccatctgtgaaattgggtgattattcccacctcgctgagctgagtgagaattaagtgagttaatggatgtgaacacgcctagtacagggctggcccactccgtagcccatttcccttcctttcttcccacttccaagtcttaaattcaccagatcaccccagccttgactctagaccaactgtcatagacacctggacagcaacatggcacggaaggccagctgcttcttccctgggccaaaataccaacacgtggtccagattgttgccaagtagacctcaatgtctgaggtgtcctggatttaatgccagcactgcatctcacccgagtggcatctgccaaacagctgtttctggtaatttttttaaaaagctaagtgatgggtggcaagtacccatcacaggtgttttcacttctgactgacacctggcctcattgctgggcagtggggatgttaagataaagtgatcccatctgcaaggaggccacagtccgcccacactgagaggtcacccaagcacactggggacagggtggtgttagtgtcaggggttgaataatggatgtcaaacatgattgagatatggccccaggctttacttcttgcttccagcaaagtggtttctctgatgaagcaagcaaaaagccaccattcgtgtaacagcttggtgccctggaattgagcacatgccttttcagagcactgaggtccccgcaagaccttcagccctggccaggtgcggtggctcatgcctgtaatcccagcactttaggaggccgaggtgggtggatcacctgaggtcaggagatctagaccatcctggccaacatggtgaaaccccgtctctactaaaaatccaaaaattagctgggtgtggtgacgcatgcctgtaatcccagctactcaggaggctgaggcaagagaattgcttgaaccagggagtcggaggttgcagtgagccgagatcgcaccactgcactccagcctggtggcagagcaagactccatctcaaaaaaaaataaaataaaaagggcttcggcccttctcctggtccctgactcccaactcagattccagaatgtttgtgaacctgttgcttctccccacctccccgcagcaaccttagctctgacttagcttcttactgcctgaagtcttgtccctcccaacccctccccacacacagcagccagagtggttgttgaagaagacagtcactccacaacctgttgctcaccagcttaaaacccttcactaatgccgccactgccctcagcatgaagtccacaatccttaccataaccaacaagactctccactggctgggcccagcctgccttttttgtttgtttggagacagagtcttctctttctttcacccaggctggagtgcagtggtgcgatctcagctcattgcaacctccacctcctgggttcaagcaattctcatgcctcaccctcccaagtagctgggattataggtgtgtgccaccacgcctggctaatttttgtatttttagtagagatggggttttgccatgttgcccaggctagtcttgaactcctggccccaagcaatctccctacctcagcgtccgaaagtgctgggattacaggtgtgaccaccatgctcagcccagcctgcctttctaagcccataccctccgtaactcaccttagaccacccctcaccaaagggaagtcttcccaggtagagaagaaaagaagggcattccaggtggctggaacagcctgggcaagtactcagagatctgaaagagtctgcaagttcaaagaggcaaagctgagacctaagtgcaacgctctctgttctcatttcatttcctccatgctccatttaccctgtgctccaagccgcacatgacaactgtccattacctccctctgggcctcggcccatgtagttttttctctctggaatgccaaattcaaaagcagcatccttccttatccaggcatccttatccttatccttcaaagctcagctttgcgcagtatctgtgggctagactgtagtgggctggatgaagaattagtgaattccatccttattggaaccatctgcagatctgccttctccaccagggtgacagcattgagggatgccagtactgtcttacgcaccctcacgtccccaaagccaacccagcatggtatacagcaagcactcaatacatacgggttaagactagggccaaatttgcctgccagggccatatacattctgcatgagctgttatcaaacagaagggacagtgacccatttattgagatctatggggaaaccaactcatgagcaagaccccagcaaggctctcgggtgtgcaggatgagatgatggggtggtgcttccccactgtgtctggtcctgagaaccaccaggaactcttgttaataactcacgtaccccagactgataagcccaatgcttcagggaagagcctggaaatgtgtcctttttatcagactgaatctcacaaaaggtcgtaacttggtggttctgtccacgccaacgcagaacctgtcctctggtcagattgccagaggcacctggcctgggggctcaaagtagtaacagggctgtccacggcaggaagaaaccacggtaaagtccccagaggctttagtggcctgtctgcccatggcactgagcctcttctagtgagtcctgagtccaaggaacagcagatgccaacctctgagaaaaaaaggcaccaagagacttgaagcagaaatgataaagaacgcctcatgtttatagaaacttctgcaaactttcttcagacctctggtttacagagttggcttaattagaattcttggttcttaatatactttcatgatgttttcctgcatagccctctcttattaatattatttacttaggtttgctactttgtgttatggcatgtaattgttattttcattgatttattatattttgataagcacctagagatcttccataacaaccactccctgatagtaacagaattctgctcactacacttcatccctgcaatgatgtacaaagaaaatttgggctggcaagaggaccttcaggagagaccccagagcccgtttgttcctggatttctgctgcagtggttctcaaccccgctgcgtatgagaatcacctgggaccccaccctcagccactgatttatttgagtaggccccaagcaacagtatttttaaatcttccccaattatttctatcaagagcactacaaggactccttagagttctccctacccctaggcaggtgaaatataaatcatctaagaagtttctgggggaacagctacacagagctctacccacccgcccttataacctaatatactttcctaaagatgcccccccacttgctcaccttaggggatccctgcacatgggacccattctactgaagagggtgtgctgggcaagtggcggacatacttctcaatgtggggcccgggactgcacctgcaccagaactgggctgtttgttaattatgtgtggagctgaatcagcatctctggaggttgaggctcaggaatttgcatttctaacaggcaccccaggtgattctcaggcacgcaagagtgtttgaatggctgatgcagtgtcagggacaaggaaagttgagagcctccaggcacaactccagggctgccaagccaggtctgtatcttgcccattctgtgtctcagacacctataagggcttaaaggataaatactgagtggggaacacatacactccttgtattttaggcaagactctttttcttatgaatgacagacagacaccaaactcaaacaagcttaagtgaaaagaggaacgcagtggcttacttagctgagcacttcatgagcaccttcaggcaaagctggatctaggtactcgaatgatggcatcgggcctcctctctctccctatctgtctgtctctgtatctcagctgggcttctctctatgggtagtcaaagaaaccggccaatgacagctccatacacaggtctcacagcttaccaccttcagtataaaatgagaccttctgaacaccccaccacactgtccacaaaaacccagtaaagctatttattgggtgatttggttcacatcctatttcctaaatgaatcaatttggccagggatattggcaaggggaaggggtgtcaccataattgcccagcctaggtcttttgtccacctctctgtattgaggatgacagccataaatgacagctccatgaagactgaatggagtggggaaggggaatattctccaaataatctcgggcagtctggtggcactggtctagctctcttaaaaatcccttaaataggctgggcgcggtggctcatgcctgtaatcccagcactttggaaggccgaggtgggtggatcatgaggtcaggagatggagaccacggtgaaaccccgtctctactaaaactacaaaaaaacttagccgggcggtggcaggtgcctgtagtcccagctacttgggagggtgaggccggagaatggcgtgaacctgagaggtggagcttgcagtgagccgagatcgcgccactgcactccagcctgggcgacagagcgagactccgtctcaaaaaaaaaaaaaataaataaatcccttaaataagtggtctagagacttaaccagtcacctggggcctgctctttccatatggcctcgtcctctccatctgatgcttgttctaaccccccatacccagatagaccctgtgatttttgttgttgttgagacagggtctggctctgtcgcctaggctggagtgcagtggtgcgatcttggctcactacaacctcctccccctgggttcaagcgattctcgtgcttcagtttcccgagtagctgggattacaggtacgtaccatgatgcccggctagtttttgtacttttagtagagaagaggctttgccatgttggccaggctggtctcaagctcctggcctcaagggatccacccgcctcagcctcccaaagtgctgggattacaggtgtgagccaccgtgcatggcctaaccctgtgatttttatacaacctcctcctctgtaccaaagcatgttaccctcaaaatgttttcaaccagccagttagtctatcgccaatctagtgaaactgaactgtacttactctgagccatgcatgcaactaaaagcctatgtgcattatccaccccacaactctcttattattccccacttacaggagaagaaactgaggcacaaggaggtttgttgatttgggactgatttggttttaagttttgttttcttctccacagctcctggactttttaaaattcctggaattgtgtctctctatcatggggctggtactattaccatacgtttcagaaaacagcatctgtttacaaagcgttttattatacaacacagaaatacatttcaccccaaatgataacagtgaacttcagcccccagaatctccttctccccttcgtgaaacagagctgggatgatggcagaggactccagaacgcactgagattgttccttggcgtgacaaatggcaaaggactctagaacgcacagagattgttccttggtgtgacgggccagacagcacacctttcttcaagccattctcacatcaaataaaacgttgataaatcattgtttctctaagcttgaaaaatgctactaactcaagacaaggtgaaagtgagtttgttgaaatcaacgtgaaggatcgagggtaccaacttggaatgtaaaaccatagaaaataccatctgggaacacggaaatcatctgtcttatctggaagcctgtctccagagtggcaaacttagggactggtttgaggacagagtgtgccctgtgtgctggggaggggtgtaaaggactgggatggaggagggggggctccagatgttcttttacccataaatacactgtacatcaccgtctgccactgaagcttaaggattgaaaaccttggggatgtttcactggttttgcttccgcctctgcaatgtttgaacttgcattttctgagccacgtatgcaactaaaagccttacatgcattacccacccttcacctctcttactagtcctatttacaggtgagaaaactgaggcacaaggagttttgctgattcgggattgttacgggttttaggttttgttttcctcctgacagctcctggactttttaaaattcctgtaattgtgtctcccaatcatgggccaggaatatgagaatcagctgtgaacttcgagcctgtccatctcaaaactcttcatctccaagacatttcaatagagctttgccagtaaacaaaaataaatacggttcggtttacccagaggccaaatcccttgtaataagttctgggccagtttcttcccagagcgggagaatatacagttgtagtttgagttgattttatttctttgaggctttgtttttctagtctttcaggccttaacctcactccctcaggaacagctgaaatatgagaagagatcatatggcccccaaaaagtccccagattaaccaagattgatgccacccagggcccagttggggtcaacaccctgtgtcaggtgcgctctctgtataattcctgtttcctgtgagaagagcattaaaggcccgttaatgttttaaaatgaaatgcaacctcttaataatcaggtttctccactctgctaggattccaaaaaaaaaaatcagcaactgacaaatgttaaaaatttcctcgctgctaatcatgctttcccccgcttccctttctttccccctctcttctaacatgaatttattttctatttgaaagccaatctcactggttattagatattctccctgctgtcactatcagtaaattattaaacagctgaccaagctttgttttaaaatgattctcttatgaagctcagtgatatatttgctatgaatactgaatggtgccgcggtctctaaggtcacgtgaatgattcctatttactacctttagcaaaatgtgtgtgcaattagcggcaagaacttgacttgaatcacagttactagggatgcctgtagctcatttacatggagctccctttactcattacactcctgcccaggagaagcgtgttaagattctaggccaggtcacgaaatagcatatagacttgtcttttgtcattcctcacctcctttcttgtcttgccactgctgagccttgacatacctgtgggaatcctttgtttcatggagcagcgggttctaagtgaatttttgcttaaagaaaataaacgtgattgagagaaaattacttacctgtctgtgtctctgcgtctcatctataaaatggtcgtcataatttctacctcacggattctataatgagaacaaagtgctgagcacagtgcctagcatcgggtaaatatttgggaggtgatgggtacttattctcctgttgactgctgcattagtccaaactctcagttgtaagtgacagagacctatctccaattcacctgagccaaagaggaaacacagtggcttccctaatcaaacagtggttgaacagtcaaggtctaacttggaaaacagaaactgcttcaagtatttgcaacagaggggatttaatgcaggaaactggctacacagatgatgagagagctgggagaccaggaagggagaggaaggtaacgcacaaatacacgagcgcaagaagctactgccaggccgaagatggatggatacaggtgctggaagcctaggagtacatgaatgcatggaagctggaacgctgacagatgtgttcaggggaagctgaggccaaggaggatactcctttgctgctggagaaattgcctaacgcagagaaagaggaggagaaattcccttgcttctccttttcccctgcctccagcatccaatcagcatcttccattggccaaaccactggaagccagctgaaacaagagtctgggaaaatgaagccaccagggatcagcctctctgattacagagcagagcaaggaaaggaaaggcaaggcatgaatctgaaggcaaaaaggctcaggaccagcccggatgggaagggaagtgtatggccagccttagatgccagtcaaccttcacgaggactctgcctctacctcctttctctcagttcttcagcattcttctcccagcactgtttgccaatggcagagagcatgactgagggtgtgctcatatcctcctaattccatgttcagagaaaacaggaagcttttctcccagcaccaatttgaagaatcctgattggtcacatgcccatcccttgaaccaatgactgtggttgagtaatgaaatactatgacttgtttaacttgagtcatgtgctcatccctgttggcagagaggctagatttgatctgagagtcagggggaagggtgcagaaaaacaagagatacccccaaattagagtaggactattctctcagtggactaagtcggaaagttttaagagtgcaatggtcattagtcccgttcactgaatatttctaattttccttccagagacagagtaggatgacatttttctatctccttagaattaagtgtgacaaggtgacttgcttttgccaagaaaatgtgagcagaagtgatccatgttgcttctaggtggaagccttttaagcagtaatatgccatcttctctttgcttttgatacagcgattggcaatgttgtagatagtggctgttccagcagcctcagtcccagaatgagaagacatggagcagagcttcctaccggtccataatgggcatgtagtgtgtgccataaacaagcctttgtgttttaagccaccgcaatttgcgggttgtgtattacagcagtgtaacctgaactatcctgactgggtctataagaaaagtactcaaagcagtgattcttctgagctttgtaccaggggcagctgcccatcaaaacaatgctggacactagcctcaaacaaccaaaaatgttaatagaggacagtgaaagaaactggatagtacttgatgttcttggaatcaccaactactgccacccttcctcctctccctcataccagtcaacatatttgcccagctggaaaatgatggctgtaataaaaactaccatttattgatcatgtgccatatgccacacactgcataaagcatctactggcatactatcttgacaacaggtatgtgcaatagacccatatttcagatgtgaaaaccaaggctcacagcagcaatctaacatcccaaagtcacagagctggttgagctggaattcatcctttagattgtctgacttcagagtatgtgttcttttttttattcattggtttaaaacaacaaaattgctctcttatcatgtaaagtctgccatggtttgcacaatttttcaagggagcattccatgactgcaccacacctcccaatcaatagatgcatcctcacttgcacaggcagaagaagaggaagttgtagaactgtgcatctgcttttaaatgcatttgctcacattttgttggtcaaaccagtcacatgggcacacctagtttccaggtggcaggaaagcataatcctatcagatgcctgaaagggggaagtaaaaaatattggtgaacaataccaatggctaacattctgagtcagagtatgtatgttcttaacctataaaataatgtctcctttatacactcatatgaatatccccctgtctgaaacaatctgttcctatttgattatacctgcattgtcattccttcctagatgctatgatcattcctgtccttggtcataaaagatttaagagacctgattgagtagtattggtgacttgctatcaaatcactctaattgctggctccatgaaggccttgactctggctctgaagacaacacttttgtcttgacccttctgaccaagctctttttttgttctctagatctaaaaataggatcccaccttatacccttgtgtctgagcccctgcttaatattgtgccgtaatgccaagccctccaagatgggagacttgctttcactggtattccagggctcgtttcctggcacagagcactagttttggtttggcatttctacctcctaccaggcctccttgtagtgactactgaccttattctgtagttggctactaggttatgtctggaacaccccaccccagctggtctgcttcaactgtagctagtttagtccctcccacagttaagcaaactttacctctgatggaattcttgcaactgatgagaatgttacccatacttatcttaacatatatagtttgatcatctgtcatgtgccaaagtcagactatgtactagatataaattagtgaagaaaatagatactctcattgctttaaggagcttactttctaatgagaagacaaacacaagacagataattacaacagagcatgctgtacactgttatagaagtttctaaattgtcctgtttctacactcacagctccaagaacactgctttcctgcccctcctctttcctgagtgtatattattaatatatgcctatagagctggattgcagtactacatttcaccaatatgtgccgccacctaacacacgctgtgcccaagcccaaaagtaagcttcttttatttaattgttaaaccttggcaccggaaaccaactgagagttgatgaggcttgaccagggcatcagttgttgagacaaagagaaagagaaaaaaagaaggagtcaagaaatatttaagaggtagaaacaacaggatgtgaggacgagagaggggaaggagaccagttaaggaagacgcagacttcctgaaaactatgtagttaatacaaacaaggaagggtttaaggaagcccacatcaaatgctgagccacagtttcagttattagctttagctgatgagtttggtgtttcaaccataaaagtattttggtaataaaccatctcttatttaaatgacagtgactaagattgtctttagcaaactcataactagaagccatcaatccactaagtcccacagcaggatctgatccccttgcagctggcaggaggttagaggaaatcccccatgaatgtccctgaacacatatgattgctgtattaggccgttctcacactgctataaagaaatacctgagactgggtaatttataaagaaaaggggtttaattggcttacggttccacaggctgtacagggagcatgatgctggccatttgcttggcttctgaggagtcctcaggaaacttacaatcatggcagaaagtggaggggaagccagctcgtcttacatggctggagcaggaaagagagtggggaggtactacacacttttaaacacccagatctcgtgagaatgctatcatcagaacaacaccaaaagggtggtgctaaaccatccatgaaggatccaccccaatgatccaatcacctctcaccatgccccatgtccaacattggggattacaattgaacatgagatttgggtggggacacagacccaaaccatatcaatcacctactggatgctatatcattatctcactaattgtttccagttctgaaagcatgcattacaatccccatttcatggagaagaaagtagaagagtgataaatttgcgggactcttctatgctggaaataaaactatgcctcaaagaactcataacctttcaactgcattgtatttcctagaaatgtccaccagatttctgtaaagcaccctgaatccagcttgaagttgtcagcctttggcacctagaactgtttttttaaataccattcattggaagatataacaaagaaatggcagagccccaggaacagaaccttatatcttagggcccaacacctgatgtcagctgagtcaagaaggaccaggtggtaacttgagaaaagcaagtgctgccattcactttgatcccacaggcgtttacttattgaaaagtggatgttgaatttggaagccaggctcagaaaggcccaagtgcagaatctggttccaataagtcaatttaatattttaattaatcatcacattttccaacaggctctgaaagcaaagaaagagatacgctttatctattccttagaatgagaggaggttctatggagatggcagagttaagagttggtgctattcatcttcaaagggactcgctaacataacaaacacttctttctcaacttctgaatccatgaagcctcaaatggaaatactttctatctgttggaaaagcattccagtcaacggaatcagtctcttgacaaggcagtaattactggagcaattttagcaggtacaaaggcatttttagtagttttaattattcaagggcctgattaattatctagtctgtagatcagaggccaagggggggataaaacttatgaaaatggttaccatgacaggataaagggagaattcagccgccttcaaacagaaagctgctctctgtgactttgcagttacatgtttgtaacctgcagtgctcacagaggatggaccactggactgggcgcttatagtcctgggttccaggcctggctccaccgccgatctgctacatccttgccttattcactttcccctatcaggactctaaaattagtaggttcgggggcggggaaggtatagggaatacaatagatggtctctggacctctgtcaagtgtgctacattctatagttccatagggcttttttaaaagtatagattctattgaaattttttctgtggacaatgaaaatccagggaaagtttataagcacgtaagggctttgatcatattttgagttaggaagacagccaccatgtagggcagatcaacatggggagagactggtaaaaggtgacatgagccatgtctgacatgagtatgtttttacctgaatgtctgcttttgggcagaacaaaggccacccccgtttatggagcctttcacctccacctgtggccccatgtgaggtactgcggagacacaggctctgccttcagggagtttgccagagcaaggatgccttgctcagacggtagcccactgatgggtctatctggagaatgatgtcagaatattctggaagcagagacattgtccactttcactgacatggcaagtcagacctggagcctctctgtatgaaccttctctgcagatgcagtgatgaaaccacctcacaaacacgcctaagccctgtgtgggcccgatggcttcccttatggagtaattgccttacctccaacatcactcctgacatgcatgcctagcttttatccaggctcaagtggtagggattccatgtatgtttctcatatgagacattttcagtcaacgttgggacagttgacaaagcgctttccaatttgttctcttggttcctccagcgacccacagtgagttccttctggactccatctcctagagtgcagcacagaggttaagaggaagactatctggttcaaatcaccactttgccattccctggctgtgtgaccttggacaagttacataacctttttgtgcctccgttttcctatatgtaaaaaatgtactgttataaagattaaagtggagtgccttataatagactgatgaacgttcgtgcccctcaaaattcatatgttgaaaccctaatccaattatgatgctatttggcactggggtttggaggaggtaattcagtcatgagggtggagtcctcttgaatgggattagtgcctttatgagaagagatcaaaaagctagcgaggtctctttccaccatgtgaagatgcaagaagttagcaatctgcaacccggaagagggccctcaccagaagccaaccatgctgggacactggtcttccagcctacataaatgtgacaaataaatttctgttatttctaagccattcagtctctggtgctttgttatagcagccagaataactaagacatgtccgtacagagtacatgtactgtaaatgagagataagtaaataacaatgtacctttgtgcagttttctctgagtctataagattcagtcaccccattactaaaatgggacagtaatccttatgcacttattttacaaatgttatttacttaacaaatatttactgtgctcctattaagtgccagtcactgccgtgggagctggagataccacactaaataaaatgaggtctttgtctttgtagagtttgctttattgtaggtgcagggagcaggcaggacaatcaaataaatgtgcgatatggaaaaatagaaagcagatggatgtggtggtgtgtgtgttttaagatatagtggtcaggggcccagtgcggtggctcacacctgtaatcctagcactttgggaggccgaggcgggcggatcacctaaggtcaggagttcaagaccagcctggccaatatggtgaaaccctgtctctgctaaaaatacaaaaactagctgggcatagcagcgcttgcctgtaatcccagctactcgggaggctgaggcagaagaattgcttgcacctgggaggtggaggttgcagtgagccaagattgtaccactgcactccagcctgcgcaacagagcaagactccacctcaaaaaaaaaaaaagatatagaggtcagggaaggcttttctgaggggatggcatttgagcagtgatatgaatcaactgagcaagtgatttggaggcaaagagtggattccagtcatagggaagggctggtgaaaaaggcctgaggcaggaccatgcatgacatgtgcaaggaacagctgaggccactgtggccaaagtacagcaggagaggagaaagtggtaggtgagatcccagggggagactcgaggcctagagcacacagagtctcacaggccaggtcaggacatagagagtatcctaatgttgatactctcattggaagcccgcagtgggatttgagagaagagtgggatgagtacgggctgacatggacactagttacatagggcatggcagaatgtgaaactgtggtccaccacagacagacacaaggtgttcaagaagttaggggagagagattatttcagactccagagagcttcaagaaggcagcagcatctgagctaagtatacgttcaatgggaggaagccaattttcagatgaagaagcggcgagcatgatgcttatggggttcgtttgttgatttattcattcattcacttaccactggcccctctctgcactgcgtcctgttctaggtgctaaggatacagtggtgtgtccattttatccagcctggcccctgtcttcaatgagttcacagtacaggttgggtggagagaatagcttaggctggtgctaattcttgttaagcccctaagattccaggcttgttactacagcataacataggttgtgatctccagtattgagtgaggtgctggtcatgtgtcggctttcctaacaggtagatatttgtcacaaaggccatgacatgatgatatgccctctgattgagacagctccatcagtaaaccctctttacatttacaccatcatcttcaagaaaacctgtagtgcatttggccaccagtatggtaccaaggtcctaataacagttcatcatctcaaagaaaaaagtgaaaaacaaaactaaaatccatcctaagataagtcatcccaaagaacagcaatctagcctcagttttaatcaagctctttaaggagtgcttgctttgtgccagggactcttccaagggtttcacaataattaactcatttaatcttcgcaacaggctgtagccctgcacacacacttcatcctcactacttcagcacacactgcctgatgtccagctgccagctcatgcattgctctgcctgagacctttctcttcctgacagagcccacgttgcagcctgaatggcaggccaaaagtgtcagggaactaacacccccactgggcatatgcactcacatggcacatgtacattcatgcacttgcacacgaaagcagtcctcaattaaggctggcttggagttggtgtataaataccccacctccttcacccctggattacacgttttaccctgagttgtgtgttttacagtctccagagctccccagggggttaagctcaagtcacctgcagcggtaacttgctctttccagtcttcctttactactcgtctaccttcacctcccaattaactaattgctcttaaatctatgtctccgggtgttcccctgagggaaccagcttaagacacaaccctttctttgagggaagaaggtaccatgataatcatccttattttgtagccaagaaaagtaaatcagagttttcaaacttattgagagagagactgaataatttgcccaaagtcagagctggtgagtggtagatccaggcttcacacccaaccaccaggctccaagatccatgctattaaccccgacactctactgcaaaaacaacccaaaccactgagcacctgcctcatttcattggctttgtgagatatgcacgttggtgagctacatagataaatacacattgttccagattcatctataaccttctctttggagattccagcatgtaattcagaagtgtgtttgagaaggtatttgatgtgattttcaatgcagtggcagccacaaggtgattcatcagccagctctctttgacagtgaattgatctcccaggtcaggaagcaaacctcaatttacgtaggatgcacttggaatgcgtcctcacagtagcacatgggagataaagcacagtcaatgacagttcttgtcaatgagtttgttatggcaagaggggagatgtggggctttccggtctgagtgctaccgctgacactccagatgcatgctttttttttttttttttttggtatgataaacactttgcctgagtcttttagccctgcctgtcaattccttgacatttccaagtcctcttttgatccaagtatcttcatccaatagcacaaaagcaaaatgagtacttacttggttctcaggccatcaaccattcttttttctttcaaaatagatctctctgatttttcaattttgtttcgtgtccggatgagtaatttcaggaccatgaggttggtgaagtctgagcttccccactcagaatttcttgccttcctacaaaaagaaaaaacaaaaaaaaaaaagcccattgtagcaaattgtccgtgtgattcatttgttgcagtcgctgatgaaaaaatttttttcttgaaggtctttcgaagatcctggaccatgatgataggaaataaccccagaaagtgaggaaagcaaggcacaaaaacttaatattaattttattttgccattagaaaatcttattctttttgcttttggggcaaaatttgagctatagagaatgataaattgagaaatagaagatctgatcaaaactgcctctgctagcctaaagtttaatgttttaaaaatacaattttatttttcttatgtctaggttttctgttctttattcatacctttaaagaaattaaagttcatatggctggtttcttcctgcttctcataaaagcgatcatgctcaaccaacagctagaactaagtttacgagaaagaaaggagggagggaaggaagaaaagggtgaaatgggagagagggagagaaggaagaaaggacaggagggaggaaggaagagaaatagtatgtggaggacattctttccatttcaaaactgtaaccacctcactgactatctacaatgaaaattcagtgggcagtcgttcaatgcctcacttaactccatctgtgtacattcaacctcttaatgccttagttttagggcaggcccattttatccttttcatcatctcaggcacaaggtagtggtgacttcagtccagaaacagagtttcttagtgtacttcatgcaacacatctaccttgaggcacttctacacaaagacacttgctggattctgaagggctaggaagatgaatccgatactatgtcagtcaagagattaggttaggcctaatgtggctaagttatgccatgtgacaacccccaaatcttggtgactagaagcaacaaaaatttatttcttgcctatgccacatatctgttgtggaaacacagaagccttcaatctacagtgtcctcactcaaggatccaggctgagggaggctctatctctgttcttccatgattgctaaagcaagaaaaacgggatgtggagaatcccacactgtctttttcaagaccccacctggaagtggcacaagttactctgctcacatttgattggtcaaagtaagtcacatggttatggcttagttccaggaaataggaaaacacagtcctatgtgcccacaaaaggagacaattaaaatatttggtgaccagctgcaatggtttgaatgtttgtcccctctgaaactcatgttgaaacttaatctcctttgtaatagtatgaagagggtgggaaatccgactatgggatttgagaggtgggacctttaggaagtaattaggattaagataaagtcatgaggctggagcattagtcaatttataaaagaaaggcctgagctagcactctcagccccctcaccatgtgatgtcctgtgccacccgggaatctgtggaaagtcccaccagcattaagatcctcaacagatgtgcccagcctccagaactataagaaatacatgccttttctttggaaattgcccagtctctcgtattctgttatggcaacagaaaacagactaagactaacaaagccaaccagacatcgcattcttgatatggaggagctcattgtcttttaaagatagcaaagccaaaaaatctttttagcggttccctaggagaggagcaaactaaacgtcacaagctcaaaggcagacctcacccaggaagaagagccttggaaaataagctggatttttacaagaaaagatgagaaatcaggctttttaggtgcaaagaagagcagagcaaagaagagaggtcaagaacacgtgagttatgctgcatgagactgagtagtttgttctgtcgtaaacagaatgtgtacttagcaatgtataaaaattaagaaagatggtaggatcagctcatggaaaaattgcatgacaagagatatggtttggctgtgtccccacccaaatttcaccctgaattgtaataatccccatgtgtcaagggcagagccaggtggaaataattgaatcatgggggtggtttcccccatactgttctcgtggtagtgaaaaagtctcaggagatctgatggctttataaatgggagttcccctgcaaacactctcttgcctgccaccatgtaagtccctttgctcttcctttgtcttcctccatgactgtgaggcctccctagccatgtggaactctgagtctattaaacctctttcctttataaattactcagtcttggatatgcctttattaccagcgtgagaacagactaatacaccaagctatggaggtgggagttctttcagcagattgggccattcattcattcattcattcaataagcagaagtgccatccttggctttgagaatgtagcagcaagataatgataataatagataggaaatgacttcaaaagagactttgacaagagaattgagagatttgggtgaatttatgaggggtgaacttatgagagtgagttctggcatctggctttggagattcggagtatgctagaaccaaatacgcagagagcacggcaagaacaggtgcagggagagggtggatgatgggccatgtgatgagctgggtttgagatcggctgagttggaggtgccaggagtggcacaaggggtctgcccagccagcgtttccctacaagtcaccaggcatacggtgagccctctagtacacactctggtggtgggacctgatcctctgtgggacactgccctggcttctgtgggtagatcaccccctggcttttgcctctaacctcccacatctgggactgcccccagaaggctggctttgggctcctggagccactttgcccacacacacagagatgaagaagtgcctgggtgtttatgtctccttggagcatctgcagccaatgactgtccggtccaggagagcacaagtccaacttttgggacaactcctgaggcataactcatgcccccagagctccccacagggtcaggcagaagctcccctcttcaagacttttgcctgaaatcctgtcttcacttggcctcctccccttctctggccttcttccacccgcccccaacacacacccacatactggtttctcctgggagcagtttcttaacacttcacttgcaaacaaatctccatcttgcggtctgttttgggggaacccaccctacatccagcacctacagtgtgccagtccctttgaaggacactggggattcaaaaattgaataatacacagcctggttttcaaagagctcactgtctggtggagagacagatgtatacattgacaatttcagtgcagtatgtgaatgtgctgttagagtaagacgctaggggtgagcgggaggcatgaaaatacgggcgagggctcttgttccacccaagggatacagggaagactttatagaggaagtggcctttagactggatcttataggatacataggattttgctaagggaaaggcagggaagggcaatataggcagagaaaacagttaatcgaagtcaagaggcatgaaatggatgggaaatgggatgtggggagactccaagtagcttgctattgcaggagcctaatgggcagagtagacagtggtgggcagagaccacagattactgcagaagccatgtagggtgtagaattcacctttccttccctttctcacttcttcactccccaagtggtgaccgcagtatcactctagaagtgaacctagagctgttcattcaggaagcacacatgccctttaatctgtactcccagcccacagcagtctcctaggagtaggtctcgccaactccgggtccccagcccagaggcacttgacagcacccataaactttctctcatcaactgatgttgtagccaaagaaaacaggctcccaggaacagataagggataagcagaaactacccagtgcttgcctgggaaactcttcttgtagttcgagttctcccagaagtagactctgtgacaagaatttgagcacccaaaatctatttgggaagtgtgagaaaatacccatagaggaatggggaagtgaagcagggaagaaaagcagccaatacagggagtgttatcaagcacgtcacctctgtgggagatgagcacttactcccaggaatggaatgggactggtgtcatgtacacacctgaattttcccaccccagggacagggtaattggggtagctgtatcccaggtcccatcaatcactggctgagggctgctcccagggagtgttaattccctgaaaagcaacaacacaccagccaggcaaggaagtgcaggtgcagaaagtcggaagtcaggccactgtgccccgaagcaagaagggcaaggaagtttgagcagggcacccatgacgcacaccacccttcatgcttcttgttattctttcccagctgtgggagagaaacatctctaaggacctgattttcccctttctcctccatgtaaagtttggaagaagagtcaggaaagaacatcgccaatcaaaaggagggggccaatgtccatctaaaagccattcaagcttcattgtccccaactattttgggcgagtgtatctgccaactggcacagattcatttcctcactccataaagcaagtgagcaaaagagaaagctagttcataataacccttctacaaagtcaaagcataatctgactttgggtttctaaggaatctggttcttttcacctaaaaatgcctgtgtaaagttctactaaagcagagagaggtgcgcatttttttaataccaccaccattaaggaaacacaaagctttttttgttttagtccagtggtttgcacagtgccctgaggcctaggagctctgcagaggtgtctcgggtggatgaggaaggcagaaagagtttttttctgctctgagtccctctcttagtttgggtttccctagaagctgaccaagagacaaggattcaagtgcaagttgtatatttgggaggtgattctgcggtcaccacttggggagtgaagaagtggggaaggaaaggcaaccaacaaagggtgagttatcaatgcagttaccactgtgggcagctagagcctgtgccttctagggacctgtgtgagccagactagagcacaagctttggcaacatcccacctgaggtgtgcgggagctggggtataaataccacggctcccttcagtcattagttcagagctgcttgtgggggacgttgattctctgggacttccagcctgcccagaagcagcaaaacgaactctggcagccagaaaaagcccttgggcagggagggagtgacagggagcatgtgctggcagttggaatttaatggaagaagccaaaattttgcagaacaagagaatatgcaagagacatcgatagcatgggatacagccccctattcttagtcctctgagaagagaggcttaaatcttctgttttacatatccgggtggcactagagatacactaagaaaaaagaggttttaaaacctctggtctgatacaatgtacttatttcacaaataaggacttagaggtccagaaaagaaagtgtgtagcaatgtgaggaccagagctgagatctcttgagcgtcagaccagggcttttcccacgctgcacacattttggcccaagccaagttttgctgctatttcattttttcaaactccttttgttcacattgtccctgttctccacgtatgcccctgcgaccttagccgactgttgcccagcatcaaccactcgcgcttcccaccagtcacatagaatgccattctctttccatctttatccagcttctttgacaaaaaccttttattacatttgcaaacagtgaccaaaaagtatgaaaaccagaggattgatgttggcacaaccactttggaattaaatgtaaatactccacttcacttgggcgacatgctgggctgataaaacagcttctgcaaactcaatatcaaggagtctgtttccaatacagctgcctattgtctttcatgtttgaagatcattcaaaagcctttgggctgctttatacacgaacatgtggatgtcttaatttataaaaatcactgtgcatcctattaatctctgcatcttcagtacccaggactctttctagaccacaataagtgctcaataaatgttcactaaatgaatgaacaaaaaaatgacagctacgcttcccctcaaactgaaatcaaaaggccagccagctgcagggattttcatgtgcacgatgagcttcagtgacattccgtcaaaaattgatcacgacctctttgccagacttttcttgaactatactgacaaaaaaattaaaatcattccattcattaaataaatatttattcagtgctaactatgggttgggcattgggatatgatggtaagagaaataaaggagagactcttcctttttgaagagtgcagcccagacagacacaaatcaagtaaccataccagttaaatgacaccagccatgataaataacagtggtccttttaaaggtaggtccacaaagcctttgatgttcctccccttgagaggtggagctcaattcccctttcctggagcatagtttgaattcagtgccttacttgtaaggaatagaagagaagggatttcatttccaagactagtctataaaaagactgtggcctcatcttgggtggattcattctttctctttctgtctctcttctcatcatttgctctgaaggaagtaccagttgccatgttgtgaggatactcaggcatgtgaggggtaagggagaacccccctttagggaggaacaggggacttctagcaaccatgtcggtgatcttggaagcagagcctctatccccggttgagcctctccagatgtctgcagccctggccaacaacctgactgcaacctcatgagcgactctgagtcaaaaccacccagttaatccactcccagatgcctaactcacagaaactcgaaagtaataaatgtttgtggttttatgttatgtttggggtaatttgttacacagcaataggtaattaacatgaaggagaagtcctagataatgtgagtgcttccatctgatctgggaagtcagaaagagcttccccaatgaagtgattgagtaatggaggagcaagaaggctgagaagagtaatccaaggaaaagaagtgacatgtgcaagggccctggggcaggaagggagcatgctgagttggaaagattgaaggaaaccagtgtggctgctgctgcatggggatcaaatgggaaagtgatttggaataaagccggcatgagggggacctatccacggagggcctcaagacattgtccaggactttgatctttatcaagagagcaatggcaagtctttgaagaaacaggtatgtgacttgatcagacttgtatttccttcatgttctttcaactatcatctcttatcaaagcattcagctgacaacttcctctctctgggcatgttttgatttccacacagactttctgcaaataatggaaatcacataggcaaaaaaaaaaaaaaaccctctgcttataatttgcagtgcaaacttcatgctaactctcattttaccccagtggctgccagtcactctctatcagctataagagggcgagatagacaaggtttaggaaacgtaggatgaagtaaggggctcccttcaaggtgaatcccaaaaatcatatgccaacgttggggtgtaggtatatctgtgcagtttttaaaggacaaagtcgagtttttatcacattctcaaggggatctgggttccctagaagcagaacctgaagccaagattcagggtcatggaagttactgaggaaggactcacaggggaaactttcaaggaaaaggaagagaaaagaacccagcaatgtgtgatcttgggtgatatgtagccctggcctgatccccagggggacactggagaataatctatacacagttaccccatcccatggcatgaggccagcctcttatacccctacatctacatccctcagttactggctgtgagttgctccctacatttctggagatgatgtaagttttccagataaaattaagtatttttatttgctaaatatagcaaccctaagaaaagggcagctacgaatcattagcagccaatactcacagcagctcacggatggctcagcaaaggggatcttggcaggacaccaaaacagcgttaaccacaacctgtgaccctgaaaaggttcaaaaccctccatctataggacggaaatggttggctggtcagtaatgttctgggaaaccatgataaattcctcacacttagaagctgcaatagggccccaggaaactaggacagagctggcatccagttatgtttgcacatctgactgactcaagtttcccagggaatccaacccaaatccagaacttacagcttatcagagtacaggaagaagccaacaggccaaaattaacctaagcatcactaaactaaaagttgcacaaagattctacagaggaaccactgaaagttcagacaaccaggtcccttgtgttattttaagtgtggggtagtacaatgagagttaaaagtaaagattctggatccatactatccgagttcaaatcccagtgcccctgcttaccaactgtgtgaccctaggcaaactgcatgacctctctgggactcagtttcttatctgtcaaatggatattataataatagtctatctgtaccagtataggatcaactgaattgatttctataaactgtttaaaactgtgcctgcttcagagtagacatcaataaatgtttacaattaatatgattatatagttataaaaaatgatgtttttgttattaaagttatctgaaacttcccagattagctccttccaaaggcctgaaaacatccttcatactactgggcagcatcatttggccatgagcttcctgggggcctgatgagtgcccttctcatctttgctcggtgttatggacacattgttgggtttgatgaatatttgatcagtggaggctgccattgcaggaagtagccaggaaggaagtttgctgtcattcaggcctgccaggcccttccactccacccgcctttacatctcatggcaggtgcaactgcatgtttaaaagccatgacgggtcactctttgagcctgaaatttccaggtgtacagtcggggggttggtctagagaaaaatctctgaccaccatgtatcgagtcctccctctgtgccaagcactgtactgaatgtttcatgaacattaccttgttaactcatcccaacaaccctaacttcttaatttccctattacagaagaggaaatggaggctcagccaccttctccaggcagggcacgcagctagattcttttactctcaggcacgagccataatccagcaggaaggacacattcttgccaatgatggccaagctccctgagatcacgggagctatttgcaggcaggtgctgaagccaaaactcaagaagaggagacactcgtatccaggcaccctctagctcacagccagagctcatattctccaaagctgggcacaagccaagagagaataacagacacccccgggatttcatagggatgttgtagagccagggaggtagcagagctaataccacaagaatacaacagtaaatacagctgggcacagtggtgcacacctgtagtcccagctactcgggggcctgaggtgggaagattgctcgagcccaggaattctggactgcagcacgtcacggcaatcaggtgtcctcactaagtttggcatcaatatggtgacctctgaggagggggcccacaaggttgcctaaggagaggtgaactgacccagagagaaaatggggcaggtcaaaagtcaaaactcccgtgcagatctgtagtgggatcgcacctgtgaatagccacagcactccagcctggggaacacagcaagaccctgtctctcaaaaataataattaattaattgtaaacactgcttgctgagtacttattaaatgttaggcgtcacgctaagcccctgtcttggtggagtttccaaaaacagactctgagatgaggatttggctgcagggtgtttactcgggaggtggtcccaggaagcacagtgagagccagaaaataaaacaaagaagagataaaagtcaataaatggtacagtgatgaccaggtcacctctgtggacaactaaggcttggtcctactggggacactttgggaagctctgtgttacacacatgagaatttttccaccaagtgtgagaaagctgggtatggatccacccactcccatcttccacaggttgagggtccctcctggaacattaactccctagcacttctaaatgtcctgtgcaggggttgagcaccctcctgagcatcagaggagcccttgggcagagaggatcacaggtgattgaggctggaagccatagatgtgtgcaggaactgcccgggaaacgtgcaggtgacaagagagtcaagaaaacattagaagggtgcaacttactatagcctctttcaggcattgtctcaccagcccagtgaggtaggtacaattgtgtgtcattttagagatgagaaaactgagactgagactcagcaaaataaaatctactcaaggtcacagttgatgagctaagactgagtccaggcagcgaggtccagagcccctggtctaaggcatcatacaacactgaggactccccagccagtgctctttgactctaccgagcaggcaacaatcgcaccaaacccatgggattctagcctcctctatttgtttattttactgtatatatttaaggcacgtaacatgaggctttgatataagtatacatagtgaaatggttactagagtcaggtgaatacacagatctatcatttcacatagttatcctttgtgtgtgtgtggcaaaagcatttaaagtatactcctagcaaaaatcctgaatacaatacaatattagctattgtccttatgtggcacattagaactctagacttcttcctcctacacctctgcacctttgtatcctttgacctatacctcctcattttctctgcaccccttccttgccccgcccctggtaacaaccattttattctctgtgtattcaactttcctttaactccaaatcctgtatgttctccatacagtattcattctactggccagcggtttgaagtaagggatggggttgacctttattcgactggagtagaaagatgaacagagctggggggtgacttctttgtcctaaccaatgccaactccattttgctttgtaaaaggactcttggaattagtaggggaggaaaaatcacctccaggtcagaagcttaccttgtgtgtcatatttcagacaataggaaggaattaccccagtttccctccagcggggtggacagaaacttcccccacccgccactggaatagtatagtcagccttagtccccctacctcctgggaaatgcatgagttggatcccttttccaacgttctagttgtgtgaccttgcttatctaacatcacctccctgaattcagttttctcatctataaaatggaaatgatgactcttgcctcttagggctgttgtggggataaaatgagataatggagagagagttctccgcactgtgcctggcacatagtcagcactcaaaaagagattcattcctcacccctcacaatgcacctacccgtaatggggatgcactgggcaggtgtgacctgagagcatatgtttgtggtgacagatccagcaagacaataattgagagtaacctgcgtggtgtgtgtgtgtgtgcgtgtgtgtgtgtgtgtgtgtgtgtgtgtgtgtgatatgctgcactcaaaacccatcctttcccacctctaaccccatgggctctccacagtgattacagtgattctaaagaattcaccaaaacatgttataagccttgattacaatgaaaaagcgattttcctaaagtggatcttccatctgctggaggtagccaggccccagtgacaaagaagaaattcctggaactctgcaaactcggggtctgtggcacaaagcccactccttcctgcagccagcctgattgacaaggcccaatatccgtcccctcccgggcctagatccacagcagcagcccacagagcagccttggaaatggacgataaatggcgcctttttatttatgagcactttccattatgggcataatacccccattctttccctggtttgtatataaacatctcaaaataggcttattttaaaaggaccttgggacacaatacttctgtttgagagaacggccaacgtgcccacgcacgctgagagtggctgggttgttacttgctggccccctttgcaagagcactcggcagtctttttgggcagagaaaataatttgctcaggagcccatttgtccctggaagtcacagagtggacaaggtcacctgctactcgagattcacacagttgccagtcctggggttggcaattctgggacccatggccactgggtccatgataataattcacatttgcagaagtcacgtgtttccaaagccctggtccctggcttttgctcatttactcctccccacacttgagttcatagttagaattttttttttttaattgagacagagtctcactctgtcacccaggctggagtgcagtggtacgatctttgctcactgcaacctcggccgcctgggttcaatcaattctcccacctcagcctcctgagtagctgggattacaagcatgtgccaccacacttggctaatttttttatttttagtagagatggggtttctcaaatttaggctccactgccctaagaggcaagtgtcatcatttccattttatagataaggaaactgaattcagggaggtgatgttagataagcaaggtcacacaactagaatgttggaaaagagatccaagtcatgcatctcccaggaggtagggggactaaggctgactatactattccagtgagggtggggaacgtttctctccaccccgctggaaagaaactggagaattccttcctattgtctgaaatatgacacacaaggtaagcttctgacctggaggtggtttttcctcccctaacaactccaagagatccacccacctcggcctcccaaagtgttgggattacaggcgtgagccactgcaccctgcctgttgttagaattcttcagaggagaaaactttatccctgaagtattaaataccttaaccaccatcccagaagaattggcagaggtggagcttggatatattgtcaaaatggtgaaagttaatcattcatttgcaaatccacctgaaatcactatccttgattcgcctcaattctaatgtcactacaaagacctctttaccctcctcccactgcctcaccccaagaagcccattgctttgctgtgtttctctcctgaatgaagcttggggtctcttggcccagggcaagaaggatgggctgacccccaggggctctggccaggcctttacggagctaaaaaggatagcaccttttcccaatctcaatgcagagagtacagtgattttttgcttttgtgatctattttgaaagaccaggtataatttatattctatttagcaaagctttatatggcacttattgtgtgccagctgttgtttcaaatgcatttcaaatcttaactcgtttaatcttcataacacctttctgagatagatcttcttattggggaatttgtaggtgaggaactgaagcagagatgcttaagtaactgtctcaaagtcacacagccagtatgtagaagagctagaatttgaacttggcctggttccagagtctgtgctttcttaaccactacattatattcttaaatgatagtgtctataattcaggtgattacccgtggtcacttaccaggggagaaatgcctactttttggaaataggaagcaccaacattgaatgggctcctacgatataccaggctttgttccaagggcttcaatacgctatcttactacttttcaacaatcttaggaggcaggtgctgtaatctccagcctacaaatgaattaatcaagactaaaagcataaactagaataggaattttagtaccctgactggtagagggccactcaacaaatccaaatccaattaattaatgtctaagcattaattaattgcttagaaactcagaaacacagctggtatgcagtggagcctaaatttgagcccagttttatctgaccttcacctgaaaactgaccaggatatccccaggtaacacaattagacaggtgtagacagtaagttatttttataaaattatcaatattaacataaatagaaatgtattaatatgcatttataatacaatatacattcattaaataaatattaattaaaattgtagcatatagattcactgatttctaattattgaggataagaaattcattttcaatattgcttcatctaaccttaatgtttcttattttgctttaaagagtacatgtaactttgtctttttttatttttctatttttctaattttaatttttctagacacataatagttgtacatatctctgggatacatgtgatattttgatacacacgtgcaatgcataatgaccaaatcaggataattgggatatgcataaccttaaacattcatttctttgtgttagaaacattctaattcactcttatagttattttgaaatatacagtaaattgctgttaactacagtcaccctattgtgctgctgaatactagatcttattccttctctctcactgtatttttatacccattaaccaacccttctttatccccccaaccccattacccttcccagcatctgtgttttttttgcttgtttgtttttgtttttttctgagaaggagtctcactctgtcacccaggctggaatgcagtggagcaatctcggctcactgcaatctccacctcccaggttcaagcagttctctgcctcagcctgccgccagcctctgtaatcatcattcttctatctccatgagatcaattgtttaaatccacatggaatttattttggtatatggtatggaatatacttttataaataaagcacatatacatatatataaataaaattatgcatatctccaaatggttaactgtctcaccatcattaattgaataatccattatttttccccaccttactcttatagtaaattcttttttagctttctatttgaaatcattttaagctttcagaaaatttgcaaaaataaaattgagagttcctttatgcctctcccccagcttcccctaatgttaagaacttatgtaaccatagtgcaaaaaaaaaaatggaaaattaacataactactctgcagaccttatttgattttcaccagtttttccattaatgttctttctctgttccaggatccaatccaagatcctacattgccttgagttatcatgtcttctcagtttcctccaatcggacagttccttggtcttccatctttcatgaccttgactctttgagagggtatgaccagctactttgtaaaatatcccttaatttgggtttgtctcatgttttcttggggttagattgagggtatgcattggaggcacaaatatcatacaagcgatgtgcctttcacagtgcaggagtgcatgatggtgcaacgtaccaggtggtacatgatgtcagggtgtcccatcacctgtgatattaaacttgatcacttggttaaggtggtgcctgccaggtttctacactgtaatgttactatttttcctcttagtaaataataaatatcttgtgaggaaatactttgagataatgcaaatatcctgttctcatcatgctaaatactaattttagcctctgttgatgtacttgcctgtgaccattgttatcgcagtatttgcctactggtgattttctatttccatcattcctctacaactattaatcaaaattcctctgcaaggaagaactgtcccttctcccccagtacatataattatttatatcagtatggatttatgaatatcttccatgggttataatccaattcttacagtaaattataacatacccttttttctcttgctgaatttactattctatttcatgggtattttggtatattcctgccccaataatacactatcttcatcattacagctttataatacatattagaatttttacattcaagttcccttctcactgtcattatttttccaaaaattcctgggtggctttttcctatttatctttgcagatgagtttttaaatagttttgtcaacttacacaaccctaagggcattaggttgaaattgcattcgattcaagaactaattttgggaaaattgttttctttacaatactgtcttcccattcaaaaacacgatatgcctttccgttgatttaagtcagctttcagatgcctctatgaaactttgccatttatttcatataggtactgtaccttttggttggaaaattcctagagtccttttccccccccaggattttttttttttttttttgtgaccagacaccttattgaactattttattggttctaaatttttttttttttttttgaaacgaagtctcgctctgtcaccaggctggagtgcagtggcgtgatcttggctcactgcaatctccgcctcccaggttcaagcgattctcctgactcagccacttgagtaactgcgattacaggtgcgcaccaccacacccagctaatttattttttattttttgtatttttagtagagatggggtttcaccatgttggccaggatggtctcgatcttctgacctcgtgatccacccaccttggcctcccaaagtgctgggattacaggcgtaagccaccatgcccggcctggttctaaattgttagtttattaatttactcaacagttacctattgagcatctaccatgtaccaggcactgatgggagaaatggggagtcaactttgttctgggcctcacagaccctaaattctagcaggtcagacaaagaacagaaaaacaagtaaatacttataagtaggactgttatttatcataaggcagtattcagtgctctatacaacactaaagcaacattggaaaaagcaaaatgaaaggaagagggtgttatcttagacatggagattgattgggaaagcctctctggaggggtgatatttgagcaaagacctgaataaaatggaagagtgagccaagaaaccatctgagcaaagagcattccaggtagagaaaatagcctgtgcaaaggtcctgtggcagaaacgagtttggcaggtttgaggcatggtaaggctggggtggttggaacagtgtgagggagtgcagagtggtgggcagagcgcaagccatgtaaggccttgaggccctggtaaggagcgtgtagtgtagtctaagtgtgatgagaaacacagaagcagggattccagtaaggaggccccagaggtcatccaggtgagagaagacagtggccaggaccaaggcaggaaacgcggaatggtcagaagcagtcaaatctttgacacatttttaaagctgccctggcaggactgctaatgggttcaatgtcgggagtgagggaagatgagcatgatggaaatgcaccaaatccacactgggcatatatttcatgccgctcacatttatcctcaaggatccagactcagccaacactttgtaacactcatatagttaatgcataaggtcatagctaatttaacagactgctctttgacattaaaaaggaaaaaaaaaaaaaaaagaggccaggtgtggtgactcaagcctataatctcagcactttgggaggccaaggtgggaggaacacctgagcccaggagttcaaaagcagcctggacaacctggtgaaaccccatctctacaaaaaaatacaaaaattagcatgcatagggtggtatgcacctgcagtagcagctactcggaaggctgaagtgggaggatcatttgagccctgccagtcaaggatgcagtgagccatgattgtgccactgcactccagccctgacaacagagcaagaccctctcttaaaaataaaaataataaaaaaaaagcttttaaaacgctgctgccaccaggagtcctgtactatcagccatggtcaaccccactgtgtccttcgacattgctatcaacaccgagtccttgggctgtgtctcctttgagctgtttgcaaacaagattccaaagacggcagaaaattttcatgctctgagcactggagagaaaggatttggttataagggttcctgctttcacagaattattccagggtttatgtgccagggtggtgacttcacacgccaaattggcactggtggcaagcccatctgcagggagaaatttgatgataagaacttcatcctaaagcatacaggtcctggcatcttgtccatgacaaatgctggacccaacacaaacgattcccagtttttcatctgcactgccaagactgagtggttggatggcaagcatgtggtcttcggcaaggtgaaagaaggcatgaagattgtggaggccatggagtactctgggtccaggaatggcaagaccagcaagaagataatcattgctgactgcagacaacttcgataagtttgacttccattttatcttaaccaccagactattccttccgtagctcaggagagcacccttccaccccatttgctcgcagtatcctagaatctttgtgctcttgctgcagttccctttggattccatgttttccttgttcccttccatgcctagctgtgttgaagagttaagtttatgattatgaaataaaaactaaataaccaaaagaaaaaaaagacaggctctgttttttgggcctgttttgggccataaaatcaatctccctactcctggggataatcaagatagcagctgaattatgttgaatatgctgtgatgtaatagagagaactcagagctaggaggcaggagctctgtgcaaacctgagcacatcactcagcctctctggcctcagacacctcacgtacaatgaaaggatcaaactggatcccctggaggtttctcctagtccaggcattcccgactctctataaactgcattatcacagggacctgagtcaaggacagcaactaagactcaacaagcaagagatgagagccccagttccccacctaaagcccaccacatagagcagagctaagaagattaaatgagaaaatatctggaaagttctagcagatgagaagagctcactccacaagagctgccaacacatgtctagttaacagagagttaacaagtatatatagatcaccaattttcaactccattatacttgtcaactgaaactctactgaacacattatattttattgatgactcaggtacccttcaggctcatgaaggagcctgaaggtcatgattataatctctaattagctttgttctggagctgtgtgggagggctggttaaccagaagttgcagatacacgagttctggataaagaattgctacctcaatggatgaagaacagattttgttcatttactgaagtgcttgttaattgtgaataattactggagggtgtactttagccatcacctacacatataaataaccatttgttccatgactccaggttattaatacgctcccagggccgttctgatataatgccgggagaaatgtgggacttacatcctcaatgtgaatatttgtttggcctgacatcagaggatgctaggaaaaaaaaaagaaaaactctgctgggatcaggttaacctgaattagtgaaggtttgagcaactagcatccataatgaaaactgcttaaggccaaggtatttttggaagctgccccccacccctcaacaaaggattacaaaagaattaaactctgggataccttagattcaaagcaggcctcccactggcttcaaagacttgggcctcctcattaaggagaaaagcaagagggtggtcctgatgtttaccaactgtcctggacctggcctcccttgtatcatatgctgggcttaaggggattaagagcgagtgagtggtgcagaggaatgggccagacagggagaggcagctcagacccagccatctcaccagacagcaggttctacacgtcccctagaagcaaagtcagcccacttcatcccttgacccaccatcatccctgactcctgtggccactctcagcttttctctgtcatctcagggctctgcctggaagtcccccgtctgtgcacatcacctcgctccctgaccagtgtccttccttacctttagctatgccatgtggtgttgtttgaattgtgtccccctaaaagatacgttgaagtcctaaccccagttccctgtgaatgctaccttatttggaaatagagtctttgcatatgtaattagttaaagtgaggtcatactggattaaggtaggccctaaattcactatgatgactggtgcttttatgagaagagatgaaaacacacacacacacacacacacacacacacggagaacattatgtgatgatggagagggactgaagtgacaccatctatgagccaaggaaggccaagaattgagggccacccccagaagtcaggaagaagcaaggaagcatcctcccctcgagacttcagagacgggatgtggccctgcagacacagtgatttcagacttctagactctggaactatgagagaataatgttttaagccacccgtgttgtcagctgccttaggaagttaatataccatgcaatacagccacattcaaacttttctgttcagccaccctttcttgaaataaaagtttacaaggaagtttaataagatattggaagaactctgattaatgtaggatgtggagagggaggagtgagcaggatctcaggcctctgccctccccttctctaactccgaagctaggggtagggcaggaaggaccatgccccacatccctcaggttccagaaagcagtttggcatgagaattagcaggcaggcctacagcacagcttctcctggacttgaaattcagctcttccccatcccagctgtgtgacatttgacagataacttattggggccctagtttcttcattagtaaagacaaaaccacctgcccaatgcagtcactgtgtagccaaatggagatcctgtttgcagagcacccaccctggccctatatcataggtggaaccatgtccccccccccaaattcctatattgacgtcctaccctccagtacctcaaaatgtgattatacttggaactgagggtctttaaagaggtgattcagttaaaataaggccattagggtgagctctaatccagtatgatgggtgtccttatgggaagaggagatttggacacaggcaagcacagagggaagaccatgtgaggagagagcaagaggtaactatctacaggacaagagaagcctcggaagaaaccagatccgcctacagcttgatctcagacttccagccaccaaaactgtgagacaatacatttctgttgtttaagccctccaggctgtggtgctttgttatggcagcccaagcaaactaatacagcctggtacacaggtcatgcaagaaatgttaatttcctctccattcctatgtgccagactcacccacaagcatatatatatatatatatataattttttttttttttgagatggaatcttgctccgtcgcccaggctggagtacagtgacgtgatctcagctcactgcaacccccgcctcctgtgttcaaacaagtctcctgctttagcctcccgaatagctgggattacaggcgttcgccaccactctcagctgattttttgtgtttttagtatagacggggtttcaccatgttggccagcctggtttcgaactcctggcctcacggaatccacctgctttggtctcccaaagtgctgggattacaggcatgagccaccgtgcccagccactggcaagcattttaatctgtcacatttgattcattctagatataccttctctccccatgtcaacatctctgaaatgcgggtgcatctggtagtctctgggagccaggccaggtgggcaccatggcacagttgtcattgccatgcatgctcaagcccggtggggattccctgtgaataagggcagctcccacatttgcaccagcaaacgacttacagatcattgaaggaacacaagtcctgggtgccctctgcaaaccttctatcaacacctcctggtaaattccaaaaattccagcagcaaaatttgcagaatagggagcttgggggacaaaaaaaaaaaaaaaaaaagagagagattcggctaggaatggagaacatttctaagaataactgcaccgtgaacacccttggtggcactaaggacaagatgacgcagaaaagtgcaggcatcgaccactgagtcaaaaagtgattcagagaaattgaattctgaatgtggaaaaggtttaggaatccttccatcaatttattttgcttatatttcccttttaatgtatgcgaatgcctgatatatgatagaatctatgtctaaatgaattttaaagagctctttcaacaagcataaaataaaaattctaagtgataaaaggtatgaactctagtttacatagcagcatttttttctttcttagtgatgcagaaactaaaagtacatcttacagttagtggtcaggggctttagtttgatgaaatatggtattaattgccacagtaattttaggcttgaggtatggttatccccattttacaggtgagaaactgaggctgagagcctacatgagcccagcatcacactgctagccacgccaggccaggattgggagccagccttgtacctacagtcccttgccacctgtgccagccctctcaagctcaccttggctgcccccaacctaaacctgaattccaatcctgaatccagcctctggcaggaagttgttgccaggcagttaaattagttggtttttcatgcatatataatgaacccttagcagtaaataaggcttttatgagtggcagatttatccatttttatggtgcaaaaggaaaacttgccgggtgtatatttctaacaggtgctgcccctcacacctgcatatgtaaatcacagtcgtgtgacatggaagtgtgggggacccgcctggaggcctgattttcaagactgtcaatagtcccagcctaaagaagcctgcattgcacagggcagaatctactgggagcactggggtgaggactacttaccagacacagctcagctactgcgaggtcataaagataatgttccagagggttcgcgtggtccccaggacacggggtgtgggctttgcaaacagacatgaagtatgtcactgagagtgggaagggaagagagagaagccattcccaggatggcaggcagagcaggaatccacagggcactctggaaggaagcaaagtcttggagtctaggctttgcatcagaatcatctggaaggcttgtcaaaatacagatgtccgggctcgcccccataaatgctgactcaggaggtctgagctggggcctgagattctgtatttgtcccaggagatgctaaaattaccaatcaatgaatcatgctttaagtatcattgctcaatgcctagattatattttgatcaaaggcacaaatatctcacatatgatctggtgtccagaaacaaccagcagccctcccagggatgtgatagcacagtgtatccaggtgtgaagagccagcctcgggcagcctggtagttaggagcatggactccagagatgcccggagaactcaaggtaagttgcttgtcctccctgaacctcagtttcctcctctgccaaatagggtaataatagaacccctcggataagcttgttgtgatggttgagttatgctaggcagggttttctctgctcagtaattgtgaagccaagtgatgggtcgaggggcattaattgtactattatcttcatcttctgtgttttttatttttataataaaaaaagtatttttaagaggcaatgcttgtacacatacctagctcacagaaggtacatttctattctctgtcccccaactctggcacatgccaccccccaaaagtagcctggaaacagcatctctaaaaacaaatgttcatatgacaggaagtggggacaggccaactaaaggaagtgctgggtttacttgcatttaattttatttgcttcaaaaaataaagagtaggagtgatgaggggaggtttggataaatgaacaacatcttccactgcctctttctgcttctattgtgatctcttgctctctgtgagtctttcctcctcatcctctccctccttctctctccttctctccttttctttccctcttatccctccttctccccctccttctctctttttttctcttattttcgacatatgtatctgtgaatctgtggaaggaagcgaaagcaatttcagaacagcaatttcagtttttacccctagcattagcaccctactcccaacatttccgtgcttgcttactatttttgtgggatagtcttgcagagtggtggaaagagcccagaattaaatcagacacccctggatttggatcctggctcagcttctcaccagccgtgtggccctggataaataaaccctcagaatctcagtcccctcatttggagaacgcaggtgacatgtttgggttcccctgagagcacagcctgagtatattcatccattttctattacttatatcagaatacctgaaattgggtgatttatgaagaaatagaacttatttcttatagctgtggaggctgaggagtctaagactgagggcatgcatctgttgagagccttctggctggtggtgcagagccccgaggtggtgcaaggcatcacatcatgaggggcacttgtttgttacagcagcaagcataacccaagctaaccttccctgcccatggagaactctctgccagtaagagaaatgaggcattcacccaagtgtcttagtacagagatgacttacaggaacttcagactctggaggatgatttctcacggtgataccaggctgttctgccatgtggcacaactgcaggaggagccattcacattttctatgtgaacagcactccccgtatttgtacaacctgccaccctgggcaggattcccagaggagtgggcctgttgctgagactccaaggatgagtaggaaccccacccatggagatggggaaaagccactgcagctggatgaaacagaagggacagagacacagcatatggaaaaccagaggcatgcatgcgtgcagcagtaatagccaccagtgtctactgagcaggaacgataggccagacagtgtgctaagctctttacatacattagctcactcaatctcacaacagcctgtgcaaattcagacactctggctccagagcctgtgctttaaatcccccaacagatcctgcctactatcactaacattggtacagcactttacagtttacaaaactcttttggactcatgatctgttttcattatggcaacagagcaactgttcccattttacaggtgaagaaacagtactaacggtcttgtgacttgtcaaggttacacagagagtaaattgagaggccaagacttgaaccccatcctctggccttagacaaaggatgccacagcaaggtgtctgcaaagcagtctctttcttcctccctgctctgcagggaggtgaggtgtctatatttagatcattacaaggagctgctgagagaatgtcctcaggctatgaattcagccttacacgcaaattcactgcagatccaggagaaggccaggaataaacgggtgggagaaggtccttgactccaaacagaaactgagctgatcaaacacagcctgagcacacgcagaggctgcaggagggaaacgagattaatctcaaaccctgtgtactcagaagctttccccagaacccaggtcccactggcaggaaattgtcacttcgtgcatttgtttatttttcccatgtcttctgccaggctccgtgtttcactgagtccttatcttctctgtgcatgtccacaggctgctgggttggaaatagcccaaagccattcagaccatttcaggcactgagttgtatcaaggatatttcttgtgggtagagcaaagatacgctcccactctccagttgggctcactgaggcctccccctattggggaactggctgggctcctctggcagagatgcctgctacttatcaaaaatgcacgttccccccactgtggtatagagttgtctctgagaaacacagcccaaccaggaactacatttcccagctaaccttgcagctaagtgaggtcatgtgacctgttctcaccaatggaatatgaacagagtgataggcttctcacctgggcaaaacagagttgatgtgctttctccacattctcgctcagcttctgcctggattcagaccctagggaatggtagagccacaagatgaaagtaaactgggtacccataaagagaaaatacttgtgttagtttactaaaatgatgagagttatttgttatagcagcaagcataacttgaattaatatatcttccttcctgactcttggcaactttagctccccatggagacaggggttggaataccacttgttcccccaaagagagctgtaatctattgttccctgttgtgtgctggcttcaccctcacacctggtttcctgcctcagttttcctgaatagaatagtagattccccttaagacagaggtgactcttatccaagtccatttgggactgactgcccagccttggtcaacatcaaaatgcgctaagactccagtgttataattaatgtccacctaccccccaattcatgtggccactgctcagcaaccctgctactgtatttgttccctttgaggttgctactggctgggtttgggccccaaacagtctctagctgtactggtggcttgataccagaaacttgggagaagaatggtgtaagaggaagagtgtattagtccattttcacgctgctgataaagacatacctgagactgggcaatttacaaaaaaaaagaggtttaattggacttacagttccatatgactggggaaaactcacaataatggtggaaggaaaggaggagcaagtcacatcttacgtggatggcagcaggcaaagaggggatgagaatcaagggaaatgggtttccccttcccaaaccatcaaatctcataagactcattcattcactatcacaggaacagtgcgggaaagacctacccccataattcaattacctcccaccagatccctcccacaacacatgggaattcaagatgagatttgggtggggacacagccaaattatatcaaagagcatgctatacaatcagaagaacctcaaaccaacctacaatttccaggatgaagttgtgctcctctattagaccaggaagctctctgtgcactgcccttgccaactgttcagtcttctccatctactttctcccaactactccatatactttctccactttctgctctcccaaatgtatggcactacctagcaccctacagccaagcatatgctgttccctccattcagaatgcccttctgacataaagttcagagcctggcagggggtaactgctggtttttgcctattcagcatccctccttcttcttctggaaacataaacccatgtggggaacctaacccatgaggtttaattagggttaaacctacttccttccccaccagaggagtaagcatgaaattgtttgggactgatctaggaaacttaatattttgacaccaggaaatatcagatctctttttttcctaagatgcatgaaaaatttaaacttaggttcttcagtaataatctgtatttgagaatggaatttaaaagtagacctcatgggagaatcacatgaacccgggaggcagaggttgcagtgagctgagatggcaccattgtacttcagcctgagtgacagagtgaaactccatctcaaaaaaaaaaaaaaaaagtagacctcagaaaagaggcaagagataaattcctgattcactgcttgagcaccttgtgtagacaatgttggtacctcacccagactacctctacaaggccagtgcacccatctgtaagtgtcaactgggaactgctaacagcttatagttgtacccttgtttaaagacttgcctcagccaaagagagccacttttcccagaaattctgaaaaggttatgctccccatgccagagggagctcccagccaatgcctgataaacacgggagtacaaaaggcgaatcctcttgctttgcagtgagacagcactgtgatgttattcctactccggagatcccaatgggaccaggctgaagctggactccagctgaaaacacattcttcatcagcttcttctcctcccctgtctggcataaaaagtcacttccttgcagttactgctgaaagcacctcctcaataaatcacttgcacaagaatccccatcacaagttctgcttgtagtgaatccaacctgaaatacccctggatcaagccatgcctgaagtcaggccatggacttcctaacccctagagcacacaaattctcttttttacttaagctggttgaaatcggctttctgacatttgggcttgaccttggagacctcatatttagtgaaaaataaacattcctgcagtgtcctttattctcaatctcaccttcatcatcagcccagagtgaggtaagcctgcagcctgctggctccctggacagtcatgtgcctagcctatgcaggcagacacacccccacacccaacacctccaagctacaaacagaaactgtcacacctcctcacacacatcttggtaactttattcagtgtgtgcttctaaaaagagtttccagatcgggccagatttcaactgcaataaaaaggaccaactgcttagcctctctttggtctgtgctgaatacaaataatacttgtatttgtaataaatgtttagagaaaaaccgcttcagtcctcggctttagagagttgtgtgcctttcaaggattcttgcatctgactgttataatgcagagattgctggctattaggatctgtcctaaaatcctccaagatgttggcactgtatggtattagaaaattatggtgttttgctgtgtcgccacaaaaagaaagattaaacataaagcagggtttaataaataaagctgaaggttgctgagcagaataagggagactactcttcattcctacggccaatgcctttaaatgcccagaatgaattacacatacgccaaactccagacccacccatccccagcattttcagtccttgtctctccaagataggctgttacaagtgacttgggtgttaatgtgtactgtgaatttcagttgacattgggtttaaacctcaggcttttcatccaatttgtgtacatgcattaaagctgctatttattgatattatcttgccaaattcctgtcaagccaataaatcattattatcatcctcattttacagaggaagtatcccaagcatagagaagttggataacctgcccaagggcatgccatcagtaaatgatagagctgagatgtgaatagaggaccctctgaatccaaaagacatactatgttcataaagctatactgccctctgtgtcaaataatataatgtggatttatctttcttccctttaaaagtttgataattttgtatggagcactgtgaataaggctgacttttgtaataaagattatctttctaagatgaaccttttaaagtcaaggtggccacaagtccccaggaccagaatttgcttcacggtggccccagagcaggatgcacactgagagccccccacgtagtgcccacttggagagcaccaggcaggggacccaggggtcaggggcaaactgcctcatgacctcagaagggcatgtgaggatccacagttcctgtcatccctgtgccatcctttgctaagacccctgctttctttctcatctgtaaaatggggatcataatgcctccctgggggtcggttttgagagttaaaacattgtggatgtgagagatcttagcaaagtgtctggcatataaaagctgctcagtcatgtttgcttctgaatctgaaggggtccagaatacgcacttaatagatgagaaactttaggcccagacagggagcaagacttgccacagccacacagcaagtctagctagaagctctgttgcctctaagcccaaggcttcctcctcttcctatatccactccatcctgaagctggggcagagtagctctgtctttactgtgccatacccaatacctcccagggaaggcagtttatgcacaggcctcctgacactgagctagcacagtggggaggggagcagggggcgagatggcctcgattagcaagaatctccctgccttcttttatctggggtggggactccaactgccttttgccagtgtgaccttacctgctcccttcaacctaagcagagggcagacacctggatagagcaggggacacccactgggcagcgagggcagatggttgcaggcaggcaagcatctccaggaggcagaggccaaacaacaaatgctaaatgagccacttccccccaaaactctgggcatcccatgaatcccaagctctgctcctctcacacattattttttcaaaccagtttgtccatcagtccaagaccaaagggagtctcgacccttagcccctgctcattggaggctgcccctgaatcaggttcgccaaatactcgccttctcactccaggtccaccaccatccccactgccaccccactgccctccctgctcaaacctaatctcattcctgattaaacttcctctcccttccatttgtaatcgtgtgcagagatgtgagttttgaagccccgtataaatatgtgctttagaattaaaggttcagcaattcttgacaatgatttctcagaaattaagcctggacaatttgtttggctggagcacaacgtctgaaacatgcatgatggaaaggcggtaaatgtactcaaagcccaacagcttcataaatattggctcctctgagggcgggcatgcaggctcacaggaacatgctgccccctggcagtgctcagggttagtgccagcccagagcccagaatctcacacatcctccaagtgaaacaaaacatcaccactcctgggcgcaacccagccgcactttcctccacttggagaggaccctggggcttcaacaggtggaagtaaatttgtgaaggagggaaaagggtgggataagtttttatctgtgtgtctggggtagcaggctctgtgcagcatgagattaaaaaggaatggaatactaatgcatgctacaacacgatgaacctcgaaaacattatgctaagccagacacaaaaagcacatattgtatgatcccattaatatgaaatgtccagaatagacaaatccatgcagacagaaggcagattagtagttgccaggggctgagggagggaggaatggggaatcactgtcaatgaggtttctgtgtggggcaatgaaaatgttttggaactagacagtggtgacggttgtacaacatcgtgaatgtacttaatgccacggaattgcacaccgaaaatggttaaaatggtacattttatgttatgcatattttgccacacacaaaaaaattacaactgggtgcggtggctcacgcctgtaatcccagcactttgggaggccaaggcgggtggatcacgaggtcaggagttcaagaccagccttgccgagatggtgaaaccctgtctctactaaaaatacaaaaattagctgggcgtggtggcagatgcctgtaatcccagctacttggggggctgaggtagagaactgcttgaacccaggaggttgaggttgcagtgagcggagattgcgccactgcactccagcctgggtgacacagtgagactccatctcaaaaaaaaaaaatcacaagaacaatctcaagtctcatttcttgccctgactccccgtccaccccctcagcatatctcaaagtcctgaacatttctgagtgtccccagagggttttttgctgacctgtgctatctgccaattccttctcctggcaccaggcttgctgcagccctgtcccctgcacctgccaagagcttccatggctgccacctggctttgtggagcagctgacattggcaagaggactgatgtctgccccaagagtgtcacctcttctcctgcaggagctgttggcatgaaagctgcggattcctcgtgctccagcctgtggaggtttctcggtggtcttagtatggctacctttctagagagcttaggaatggcccacaagcggggctggaggtctgcttggagacagacactgcatctggctcagaagctcctttctggtttgatctgccatcctcaaaccagacttgtggatctagaaaagatctccccaggagctcctggaatccatcttttgacagaaccctggcaggcctgtccccttccccatccccatcttcttgacacatcaaatcccaggcgagcgcttgtttagtattttatttaatcctcatgcatatatgaaacacagattcttattcccactttattgctgaagaaacaggctcaaaaaacaagagccacacaggaagttggtggcagagtcagaattccaagcctggtctgtccaaatttttcctggaccccttgctgcctctaggggcttggttcccataatacagcaaggatcagaggcaaggagaactctgggagtcataaactacctctcccacaagcctgggagctcagagagggcaggagtgggagattcatctttgctgcccagggccaagcacagaagcccccaagttagagacattagtgattgtttgctaagatgaactgggctcagaccccactgaggctgagataacagaatggggttggaagagaaaaactgacctgaatctttgcttagaacttaagataaatgatgagttaaaactggttgcggggtaggcatcttactctctctcatcaactttggttccaggtcatacacaaacacacacacactctctctcacacaaatccagcctcaggttttcaaaacaagagattaaagatatggttcttaatactcccattgtactacccatctactcacaccttgagcagtcaaaccatttttaaaagggctaaagaattgctcaaaattcttagattcaccttaaacagttagaattaattttctctgacacacgttgaatgacagaattgggtttcagaaatgatcccaccaggtcggggtggtgggccaaactgaacaatggagttcaggaaggaaaaatatgaatcccacactcagttcaaaaactgtgcaggtatcagatggacaaagtgtgacatggcagtcgagccacggtgtgacttgaatgcccaaactgtctgattttatgttggacaatataaatgcaagtacggtcctcaggatgagggaggtgagagggcctatctcctatcaacagttcagagcatgctgaggtctttggtaaggaattccgcactcccctcttaaaaggagcaagctggagtctttccagagaagttagacctttactttcttcttcaaatgaacatggttctagttttttccccctctcaatttctggcatcatcatgtcctcaaactcccagagagaatccctaaaaggactggcctcaaccatctctctcactttctgctgctggcataaccaggggctgccagtcctacttcctgaacatctccagtgccctctctccctttccagcccctctatatcttaacttgtgcagtggccccatacctgggcccccagcatacccctaacttctcattgtccattcttcttctcgtgtttaactcctttgtcctatccccctgcaaggtcatctctggccccaatcatgcacaggataaagtccaaacagcccagcatggccctctcctaccctccgtcccagtctgtcttaccctctttgcctcacaatgtcctaatctcataccagggggtccatctctctttctggctttgaaggtgccatttcttctgatggaaacaccactggcctcccatttcccacccacagaactctgactctcccttcaagtccaggatcagccattccttcctctgggaagacacaggcagtatggtccctctgtctttcaggctcctgaggttccctgagttacccttatcgtattgttctggacctgtggaagggtctgtcttttctcctagactagatgtcattgagaacagactgactcctattcatctcataaccccctgtgcctcgcacaagttttgtacgcagtacttaccaattagtgtgcttagcatgaacggatgcatggatggacggacacatggataaatgcatggttgatgcatggatggatgggtacgtggatggatgggtacatggtggctgcatggacagatgattactacgtctgtgatcagattcagcgtgacttcatacaagctctgtcaattatccgctcaatgagcacaggttccagggtaggcataagctgtgggtatgaatctgccattcccttggttggtctctgtccgtttgagcctttcaaaatggaggctcttcattgcaaagagatctctgcattgatttggattccagggttggaggattcatgtttcttcatacaagactcttgacccagtgacctgttccagcactggaggaagagctggctgcagcggacttgcccagaggcattatgttagtctgcactgagagacctccctaagaggtcatagcagtttgggttttccaggaagcagacctgaggcagagaacagcaagtgctcctgggatcactctctgtggaaggaggcaggattgggaagagagaggagttggactgtgatgcagtctcaataaaagctcctgctgactccctcgggcacaacttggagatgtcctgggttgaggaaggagaccaggcttccatatacacatgtcaatatgtgcttccctgggaaggagacacggccttgagagaagtgactctcctcagttgatgcagttctgcagagggccatcaattaagggctgacagccagcagcacccccggcagcccggggaataagtccttcagccctgcatggagatctgggtggcatatcagagcaaccactacagtccatgtggcttttcttcctagcacagagtcttgtacacagtacttaccaattggtgtacttagcatgaatggatgcacagatggacggatacagggataaatgcatagttgatgcatggatggaagggtacttggatggtggctgcatggatagatgattactatgtttctcctaatagcatgtctgtacatttcccaaagcctcaccagggtgtgaaatctcatgccccgggagaatgcttccaactgaaaaactcagttatccaacaccacatctctttctgcccagcactctcagatctcagtcccacatgccctcgcctgactcctccaagtacatgcagacaaggccctgcatctcctttggggcatattctctttccttccttgtgagacatggtaaactgggttatgttgagacttagccctagttgtagcctatgagcaggaggggacttgggggcagattccaaggggaacataaggccttggaggagacagatttctgcactatcttcaggcaagcggggcagtggttactttgcagactcagcaggtttaggggaatctcaggatgcaagatgttggggtgcatctacccagatgtccctgtctcatgtgtcatggtctcatcctttcccaaccagggtcctcatcatggcatagcaaggcaggactaagatgaaaatcaaacttctgctactctcctgatgaagcctgggtccgggcctcagctttccctgctctcaagctgtaggagatgagatttcccttcctagttaccaaggaggacctctggctttcacactacactgttttgaggggcaagagggaaataggaaactcactttgttgcccagctggggtggagcagtgcaatcacggctcactgcagcctcaacctcctgggctctagtgatcctcccacctcagccttctaagtagctgggactacaggtgtgtgccaccaaacccagctaatcttttttttgtagagacaagggtcttgctatgtcacccaggctggtcccaaaccccttgccttaagttgtcctccagcctcagtctctcaagccctgggactacaggtgtgagccaccatgcccagccatactatgcatttaattgactaatgagcattcagtccttccttatcttttttcagtgtgtcagctgagctgagcaacagccatccaatttctctgagtttacaggtcaaatgtctgataccttcctagtgcttttccttccaccagaatatcatcccagctttcacacttatactgctgccctacagcagaggccatctgtgcttcacatacctccagggatggggtcctcactgccagccaggaggtaggtggtctgcctccaaagctaccttaacagctgctttctcagactactcctcgcgcccactgtcccagtttggatttctccagaagtggactctgagttggaggttagagggcaggcttcttagatggtgatcttgggtctgcctcgggactctggatatattagttattattcactgttgtaaaatatttgtacataataattccaatccaatagaaatgtatttctctttacgcaaagataaaagaggtgttttgcgttctcagatggctctcttccaagtggcgactgagggacccaggccccttttctcttgtggctagaagctgtctgtgccatgtggccccaggacctccacggtcctctgaatagtgtcagtggcatgagcctagaggtcttatgggccgggcctggaagtggcaccaatcactctgcccacatttcattggctagaatgagctacatggccacacctgtctgcaagagtctggaaaacaacacttagctcctcttccaaaaatgaagaggaaatgggcttggcaaacaaccagccactgtctgtagcattcgagaaggtgaacctttcctctctggtaggaaactagactagcactggatatcttgctcttagctcagatcagccagtgatgctatggtcactgaagtcattccataactcttcagtttaaatcctggctaccttctttgcactccagactttccatagccacgagtcttctcttaagcttcccgctaaagccttccctaccccgcccatcacatgcccaagcagcagaaactacaaatagcatatgtgagacctagcaccaccagcagaggaagaagacataatgaattttggctcaagacccaagcagcatccttatctccaggagaaagctacaatagcttatttcttcacttcttcagtctcttacagtagctatgacagtttcttacaatttttttgagattcaaacactccaaggatcagcagtggacaagttaatgagaaatacaactgttgctgttaaaagtaaagagctgatcacggtgaaatgtgaagaaattattgcatttatctagggtttgtcagtttaagtgcaggaagttaatgttggggaaacaaaaatggcctttgaaccaagtgaataatgcagttgcttcttactgctatgttttatacctattattaaattaaatacacacacgttcaaatgcttccaagataatgcattgaaaataccttttgggaataagtcatacttccattttgagatgccaatttgagtctacatatttaaatccttttcctctgatctgccaatagaaatgaacaaagaaatatagagatttagtaaaaggaaagaatctatctatctacatggtagacaaaaaggatgactgctcccaacaagccagaatcattgtggcatgtctaccagacataatgtaggtggcactacgttcaggaaaatataggcccacccataactagaaataagtgaagggaaaaccccatctagaaagtaggcaggatagattgctggtagaaccagagttcctataccaccccaccaaccaaataagataaaattgacagtgtcagtggctatagataaagatgagatgtgagatgtttggcaaggggtaaatcttatcctcttatgggtgtgggtacaacaggcctagaagaagcacagtgcacagctactgtcagggccctgcctgtgccacctcagcatttattgatttccatgccagcctgactcccaacctctagcacctgcaaagttttccccaagggctctctctgaccaccagcaccagctccatttgtgtgaggcaaagcagaagtatcaaggccctggaagctgggtgtgtaaatacctcagcttcctcacctctgaggtggaatgattttgaggagcatgctgcacactggttcccagagctccctggtgggactgcgttgcagttgtgcatgctggtaacttgcttgattgtgcactttgtattggcggtctttccttctctgtcccacttcctcactcccatgacaaatgtgtcataatatctcctctcaaataaactacttaggccgggcgcggtggctcacgcctgtaatcccagcactttgggaggctgaggcaggcggatcacgaggtcaggagatcgagaccatggtgaaaccccatctctactaaaaatacaaaaaattagctgggcgcggtggtgggcgcttgtagtcccagctacttgggaggctgaggcaggaggatggcgtaaacccgggaggtggagcttgcaatgagccgagattgcgccactgcactccagcctgggcgacagagtgagactccgtctcaaaaataaataaataaatactaaataaataaataaataaactatttacacttaaattttcatgtcaggatctgcttctgggaaaacccaaattaagcagggagctaaccccgaatcttctgaaggtacgggtggtgggccaaatgaagtggagccattgccatagtggggccataggatgggcaatgtagccctttagggatgagggccattgtcttagctaatgtcaaagtaatttgaacataggagacgattcacccaggttaggggcatccctttaaatgcctccactgcacatacacaaacacacacacacacacacaagtaactagacttcatctcttcctttgtggaacatttgaacagagacccttatatttgacagaacacatctcacccttgggcaaacacaaatctctcaaagaataataaaataaagaaaaatcacctactataagaaaatacttgatggtaaaaacaacagcccaattctgcaaagtctctacaaatattttcctgtatatacatttgagaaaactgtagaaaatcttcctaaatacattcagaaagatccaaaaacacattgcaagatgtttagcatcaggggaagctgggtgaagggtgtatggaaactctctatagtatctttgcaccttttctgtaaaactaaaattatttcagaataaaacataaacacaagacaagactaaacaaaacaaagcaaacattgcctctatgaaagaaatgctctgaaatcagaaaacacttttggcaggaaaagcaaatgtgatcatcaaaatatctaaatgagtgaaggccaaacaatggattggatactgtcaaaacccaaaggagtcacttgggaagatcagcatgagtaatttcccctaactcagaggaaaaggatgaaaagatgaaaacaatgagacaagagagaataaatggaaaatggatcctggaggctcaataaacccccatttggaattctagaaggaatgaacgggacagatggaagagaagcaataatggaagaaataacagaaggaaaagtccctcaactgtaagaaatggatcacatcccaaggatggtgagtaagtgctggcagaaaaacctgcagaaagtagtgacatggacaggcaccaaagctcagcccccgggccatgcctgagccccttggcatctgcccaggtgaacatcgcacagaagaaatgcaaaaaaacactgctctgtctgcagttgcaatacaacaaccaaagaaatggaaaagtcttggattcctggcattgctcctggtgaccgcatatttgcataggtcagggacatctgaggagtacccaaaagaatcctacggagcatgtctgcacagctctaggaaatgaacaaagctaaggcagcctttgggagattttcttggaggtgagggtggggatggggggcttaggattaggtcccaatgcaatgtggcctccaacccttccagtttccttacctttcaatgtctgtgttttccctatccccactccatcactctccctattcagactagaaagcttagatgatgactatggactcatcctgttataccgcagtcctactggtctccaggtgatgactttttatgattagtgtctctctcatatttatccgtccctttacatccctagagcctcaacccaagtccaagctcttagattattttaacactatcccatgtggacttcatgcttccagcctctgaaacccagccacctactgtgtaccaagacttggaccaaaccagatgtcacaaactaaaatgcccataggtgatacaaatgagtgaggcaagcaggtttaacaatggggagcagtggggactgtggaaactggagggtgtgactgaaaggaagagccactacttgccccccccagcccattattccccataaaaaccgtgactcagagaagcccatttttaaatgacccagatcttcccattaaaaaaaaaacaaaaccctgaaactcagacttttttctgaaaccttttctcaaagctttaaaaaccgggtttttaaaagttgacaattaattcaatttttaaactctctgagatattcctatcttctttggtctctgacatattcgcaacccctagaacagtgctcaggaaatattcctgaaggctaagtgttgcacagatgcagtaagatgagcaggattttgcatgagtcttcatgaaaaatctagtttagtcttcacacggtggagtaggtatatcattcttgccttagagatgaggaaaatgcactcacagaggggcagaggcttgcccaaaatcacacaggcagtaccagtactgggatttagttcaggtctctctgaccccactacaccactcagaaaaaaagggacccttctctgtcactatcagcctgtaggttcttatacaagccatcctcaacacttccctgtccctcaaaactacttctctgagccttctccaagttccctttgtctggttccctaaatatttccatcactagcccaatctcattatcttcccctgaactatgaagtggcctcttctatatggcctccctgcctccagtgctgcctcttccttcattacggtctccacagttttgccagatatcattctggcagaagggtgatacaagacttacaagactttcaagaggggagatggccacgcttcagagcctactagttgagtttcttccacatctagtctgacccacgtcccaacctcactgtccaccactaattccccaagtttacaccacagccaaccttttcaaacttctttcctacaattccctacaagcactgtgcttttcactcctccttgcctttgaccatgctgttctttcccacaataatgcttgtgcttcccttctcctttgaaggactcttactcacccttaaagacctggcttgaatggacccttgcaagagaacttccctaagacttccagagtcacccacagctttctcatggcctcctagtgccttgtgatgtttccaacaaagcagcacatctcaccttgtgtcacagccactcgatcgcgtatttgcctcctcaaatagatggctccctccttgtcttcttctatatgactgtccttatgcctagcagaggcatagatttcaacagattcaataaatatgttgtaaatgaacaaatagttatagctttgccctttgcactcacgtagagggaggaacaaaatatcgtttataatgatctcatttaattcttttaataaccctacaattctgtaattacatccatcttaccaaggaggaaacggacacccagagagattaatatgctcaagataggacactagtaaaaatttaaatccaggaagaatagctagtggatgctggtcttaatatctaactgataggatgatctgtgcagcaaaccacagaagtatgtggcacacatttacctctgtaacaaacctgcacatcctgcacatgcacccctgaacttaaaataaaagttgaaaaaagaaaagaatttaaatccaagtctgtgaacttccaaaatccccattttgttcatgataccctgtttcccttccatgtcagcaacagtcctttgaattttccctctggaatcttcttgtcatctggctcagcaacctcagttctttcagccattcctgacttgctacagagtcctgaccaacttgagcaggtgaagaagttcaccattcttcatcccgttgatttgattctcacatttgatcaccacagcttctccaggcaaattctgctgattataatgggaatttgaggaaagaatggggatgactccttgcaccccccatctccctcaccaagaagaaacataaaaaatgcacatcctcatgactatctcctttaaaaatgaatgacagggttcgcctattctgtacattttataagatggaattatacaatgtatggtcttttgtgtcttttcagagggtcggggagaggagaatgagaagtgactgctaacaggtacagcgtttctttttggagcaataaaaatgttctgaaattagagtggtgatggttgcacaagcttgtgaatatactgaaagctgccggattgtgcatttttttattacggctacatacacataaaagttaccattttaaccatttctcaccatacagttctgcagcactcagtaccttcacacttctgtacaaccatcaccaccatccatcttcagaactttgtcatcctccctgtgttagtcagggttctccatagaaacagaaccagtaggatgtgcgcatttgcgtatgcagtcacgtgtcacttaacaacaagaacacattctgaaaaatgcattgttaggcaatttcgtccttgtgtaaacatcatagcatgtgcttacacaaacctagatgtcatagcctcctacgcacctatgctatgtatggccgattgctcctgggctacaaacctgcatggcatgtcactgtactgaatactataggcgattgtatgccatggtaagtatttgtatatctaaacatacctaatcctagaacagatacagtaaaaatacagtagaaaagattttttaaaatagcacatctatgtaggacactcaccatgaatggagcctgtaggcctggaaggtactctgggttagccagtgagtgacttgtgagtgaatgagaaggcctaggacattaccatatactactgtagactttataaacactgtaaatttaggctacactaaatttatcagaaatatttttctgagcacagtggtacacacttgtagttcctgcttgtagtttctgattgtaattccattttttgaggaacttccatattgtttttccgaaatgtacatttttttctttttttttttttttgagacagggtttctctcctgttgcccaggctggagtgcagtggtgcctcccaggctcaggcaaacctcctgcctcagcttcccgagtagctgagactacaggcacgcgccaccatgcccagctaacttttgtatttttagtaaagatggggtttcaccatgttggccaggttagtctccaactcctgacctcaagtgatccacccacctcagcctcccaaagtgctgggattacaggcatgagccaccacacccggccccaaattgtacagtttttaaacagtgaattttatggtatgtgggttatatctcaattttaaaagtttaaataatgcagaaggaacaatgtgaaatattctataggacaactagcctggactcttccaaacatcaatgtcttcaaaaatcagaaaaaaaaaaatctaggggaaaagttgcagatcaaaataaagaataaagagacccaacaaccaaccaagaaaacgtagatgacaggaaaggtggtagacactgttggttcattcacccaatacccatttccaacttttctttcttaccttcctccaccgtgaggctggaaggagaaaaggttgaggggactcgattccccagcctctcccacagctcacggtggagagaactcttgcagttctggtcgatgaaatatagtagaaatctactgaacatttctggggaaggttttgctttcctatctcctccttctttctgcctgaaaatgcaatgataaactggaaatggagcaacatcttgcaaccataggtaacaagctctgctacactaagactagaagaatggaaaccccacctgagttcttgatggcatctttgactgccacaccagccacggattccccgcctctggacttcttgttacatgaagttggtgtttgtttgtttgtaattctttaagctattgttagagttcctgttatttgcagtcaagtgcattcccaagtattacagggagacttcctgtaagaagatggcaaattgccttagcctccctatacctcagtttcctcatctctaaaataagaataatcatgaggattagatgaagaaacattttagggttggtgtgaggattcaagttgttactatggttgaagcactcaaatgagagtttatggataagaactcaatacatgttagttgttactttgttactattattactaatactattctcgtagaatgagaaaatgttcacagaactccactctctgaagctcatcaaattaattaaaaaggagccaaggccgggcacggtggctcatgcctgtaatcccagcactttgggaggccgaggcgggcggatcacgaggtcaggagatcgagaccatcctgactaacatggtgaaaccccgtctctactaaaaatacaaaaaaaaaattagccgggcgtagtggcgggcgcctgtagtcccagctacttgggaggctgaggcaggagaatggcgtgaacccgggaggcggagcttgcagtgagccgagatcccgccactgcactccagcctgggcgacagagcgagactccgtctcaaaaaaaaaaaaatacaaaaaaaaaaaaaatacaaaaattagctgggcatggtggcatgcacctgtagtcccaggtactcgggaggctgaggaaggagaatcactcaaacccaggaggcggtggttgcagtgagctaagatcatgcctctgcactccagcctggtgacagagcaagactgcatctcaaaaaaaaaaaaaaaaaaaaaaaacaggagcccaaaatacagatggagatttcagtgaagaacctagacaacatctatggactcagccacatgctagctcatgggaggtggaccaaaccaaagagagatgcctggaagccatgtagtttgatggacaagagcctgggctctggaatccacttggctgaattcaattcctggatctgccacttattaggttgaaacgttaggtgaatcatttaacctccagatatagtgtggctatttgtcctcccaattttaatgttgtattgtaatccccaatggaggtggggcctggtaggaggtatttgggtcatggaggctatgatggttaatactgagtatcaacttgatcggattaaaggatgcaaagtattgttcctgggtgtgtttgtgagggtattgccaaaggagattaacgtcagaatcggtggactgggagagccagacccaccctcaatctgggtggacaccatctaatcagctgccagtgcagctaaaaaaaagcaggcagaatttggaaggatttgactggctgagtcttctggtcttcatctttctcccgtgctggatgcttcctgccttcaaacatcaaactccaagttcttcagcttttggactcttgaacttgtcacttgaaccagtgacttgccaggggctctcaggccttcagccctgtggctaaaacctacttttgaggttttaggactcggactggcttccttgctcttcagcttacagacggcctatagtgggatttcaccttgtgatggtgtgagtcaatactcattaacaaactccccttcatatatacatcaatcctattagttctgtccctctagagaaccctgactaacactgaggtggatccctcctggcttggtgctattctcagggtagtgagttcttgtgagatctggttgtttaaaagtgtgtggcacctgcccctctattgttcccactcttgccatatgatgtgcctgcttcccctttgccctccaacatgactgtaagctttctgaggcctccccaaaagccgaggagatgccagcatcatgctttcctataaagcctgcagaactgtgagccaattaaacctctcttctatataaattacccaacctcagttatttctttataggaatgcaagaatggcctaacacactccatgagcctttatttcctcagctgtaaaatgaggatgataataatccctaactcaaagagttgtgaagatcaaatgaagtacgtaaggtgcttagcccagagcctcgcccatggtaactgtactagactctccatttcttatatgcttttactgctgctgctgaggttggtgttatctctagagtcttagaaaaggtgtttgataaatacttgctggaatcatggaaggatcaattgaataaatggatggatggatggatggatggatggatggatggatggatggatggttcaatagaaagatggatggatagaacctcttggaagttgggggttaagtaatattgaaatatcctattggtcttggaagggtaacaatatccatacacacatagccccactaggacctgtctggactccctcctccctccccacagcgtagaaaaggtagccttaatccatagtctcagtgtacacagtccctcactgatagtcttttttttttttttttttttttgagatagagtctcgctctgtcaccaggctggagtgcagtggtgctatctccgttcaccacaacctgcacttcctgggttcaagcaattcccctgcctcagcctcccgagcagctgggactacaggtgcacaccaccatgctcggctaattttttgtatttcagtagagacggggtttcaccatgttgcccaggatggtctcaatctcctgacctcatgatctgcccaccccggtctcccaaagtgctgggattacaggcatgagccaccgcacccggccaatagtcacttcttaacaaaactctaaaaacaaaatatatctcgccactgccacaggaattataggctgtcagtagccaagcactggtgcatatctctagactttatttttaataataacatgctgggcttctccatcttggggtaccaggccacctttggatctcctcgacactgtttgacaaagaaagggagtgcctgtaccacccaacctcaagcaagccagccagcttcaaccagacagcaccataaatcataattagcaactacattcaaatgtgggtgtggagggtgagggcagcgaagcccacgccaacctcaggcacaaaggcaaacctcagctcaattcagtgcgaggtaattacagggactgtcagaagctggtgccagctttactttcaagtcgaggaagctgcaggaacctaaaaactccacgtattcaaaaataatcactgaattcccacagtgaattcatgggtcaatcactcaccactcctaaataaagatgtcagcaaagtactttgtttctttcaaatggaacaaaaaaaaaataagttacttccttttcaatgatccccgaaaaggagagagcagagaggatccctttttacagatgaggagaccaaactttagagaagttaaataattttcctagagcaaaagtgagaatgggatctgtatccatgtttgtatgatcccaaagctagcacaagttcccagaagccctcgctggtcatcttagttggtatcatcatagcatcctatggctgctatgtcctgcctgccacagatctgtccagctgcccacagtggtgtccagtcatgtgaacaccttggcccagccaaacagcttctcatgctgagctggcctgggtctgccgcccacatgcctgactcagtgtgctagaggcgagaaagctgcccaagatcacccctctacacatgtatatataactgcccctctaaccttttcccagggtttcgctccagctccctcccaggactgacagcatagctgtagctggacaccttagcctaattcctaccactaaaaacccccagagctgccccagccctgcctgggcctcttgcttatgcccacgtcacctgccttattttctcactaacacagatatttattgagtaccctccctgaatcaggttctcagagtccagcagtaacaagacagccatggccagagcctcatggagctgttagtctagcaaaagagacaaatactaaacaaccagggaccaaatagctccagaatcatctattcaacacatcccatgttctagtgggaagatcctctgtaacaggacatctagcaccaagctaaacatcacccttagttaacactccacgaaggtctatgagttaagtattaatatcatccccactttacggatagagaaactgagtctcagagagccacagtgagcccaggaactcatagtttgacaagtggacgagcaaggtttgtacccaggcagtgtaattccacagcccacactctaaccagctgcccaatagtgtacggcagactcaaggagccaatagcctcccttactttgaaaacaagtttaaaaagtaattcagatggacaccagcatactcacactacccagacattatcttttaaaacagcttgtatttaccactcaacaggtgtccgggtggccctgggcacaaatcagaactcatttcttgccagtggggagacccgttgcaaggatagaggacaagccctccttgcagccattggcaggccccatccatctggccagccagtgttcataggagaggccagctgatacccccatagtcacagccaaggccggccactgcaagctcggagcagcacgactgatttcggatctctctccctggaactcgggaacacatcaattacccatgcacatgctgcccattcggaggacagatattacctcctgcactcaccgcagagccacgcgtcctcatccaagcacagatggaggacaagggcgtggggttaattgatcaagcaacaccagtgcccgtgcaagggttggcagaaaatggctcatttcacagatgcacaggctccttccttgccagtctcctgtgattaaaccaggtcactaacgtgcttctgaacaaacatgcctgaacttacacgttcaggttcatcttgtctcctctaaagtggtcaccttggaatactccacatgcctttctccactctgcaaacatttgttgaataccaaccagacacaaagtatggtgctagcatggtagggtgggatacagttcagtgcaacgtagtcgatttcaaccgacgagcacaaactaggtactaagaccccatagtagatgattagaaggtgggtcctatcctcagtacacaaaaggcaaacaaaaggttattgatcaggcggtgggatatgaggaaagcaggaagttggggaggacagggtgtaggtcatggagacaataccagatagagggtgctaaatactggaaaaatgatagcgggtgtcaattttatgccttaatctcagaaaggcaagacatgtcacaataattgcatttgctataaacctatcccaagtctcagcttactgacctggcaggaaattcatatttggggttcccttcttgccccacaggatcctgtgaaggtctcaagggtcttacacatacacccagctttgggtatgtccaatgagtgtaggtccacactgttgcctttgttagagctgttgtccaagccctctcggcatcctgttggctgataccaatgttgcctccgtgaggttgggctcagatgtgcagtcaatgcccagaccggaagccccaatgcctggggtccaacccccttaaaaccccttaatagtcatctgctctggtttcctgctgtttccagaaattcccttctcctcaaaaccaaactgcaagtttggtcttcatgatctcgctctctccctctctctttctctctctgtttgattctactttctccccatcaatggtctttccctccctccctccccactttgcattaccccctccccgacacacacacataaacatccacactctggcactaagcctaggttttgagataaacaaaaccagggaagagatccctattcaggcaacttgtgcttttaatcttacaacacaagcctccctcagcaaggaaagacaaaaacctcttcaccttagaatatggaatgcaagaacacaacacaaattcatgtattaagtcatcccatctgtcaaaggaagccccagaaacagaaatatttagaaaagaaaattttacttgcagagtgcaagggaaccagacttcagaagcactggttcaccaaatgcaaacacagcaattatttccaagaaaacaattgcaaaattatcaagttcaccaggtgtatattaatcgtggcatgaaaacagcaactctctcctgtgacggtcataatcacaaggtcctgatctgtcttcagagatcatcatagcaagaatcagagataaaattgtctttctcagggagtccaggtttaagggaaacatacaaggatttgtgatttgggagactctgatatgttaggtttgtcttggggtttaggaatgtctatttttatcatttcactgtctttttcccctaatatactgtgtgagatgcttaattatactggaatcagaacaaagggatagccttggtttctaaccatcaggtgatctacagggaaaatgcaatggaaatccaaactagttaatcagagaaagtcataaaagtatcagtatgagacctgaaagcctgagcaggctttgagcacatgatggagagaaggcaaagacacggggcctgttcaccgagctgggaggctcacagtggagcctgggggatgtgaggggaggtggaaagagctggttgaaggtgaggctgaggctcaggagtgggtttctctgaaatcccagctgtctggagcatgccaagaacagcaatctgtaccagtggccttggaatcctaaaatattagccagacaccaaggccatttaatccaacctctcttccaacatagatggggaaactgaggtcagggagctagggtgtgtccccacaatcagtgatagatagcatgtttagccttcaggctgatggggaggtagggaagtgaatttttgaaaatagttaaaaagacattcagagtcaggtgtgaagaatcaggcaagaatcaaggtgtgcgatgccacttcctgttaaaatttttgtaaaatcaatttttgtaaggataaagacaagaatgagagcaattttcttatgccattaactgccactgaaggccattcccagtggacagtccaaacaccgaagagactgattggaatatggacacaacccccaaaagtggccaatactcattttggtggttacgctctggggtctttactttcttcctgtgtattgcttatgttaattaaaaataataatccaaggccaggcgcggtggctcacgcctgtaatcccagcactttgggaggccaaggcgggaggatcacaaggtcaggagatcgagaccatcctggctaacacagtgaaaccccgtctctgctaaaaatacacaaaattagccaggcacagtggcaggcacctgtagtcccagctactcgggaggctgaggcaggagaatggcgtgaaccagggaggcggagcttgcagtgagccaagattgcgccactgcagtctggcctgggtgaaagagcgagactccgtctcaaaaaaaaaaacaacaacaaaaaaaaaaaaaacataaaaataatcatccatgctcactgtgaaacatctacacaataaagaaggaaacagagtaaagactgaagggtccctttaatagctatccctgatctcactcttctaacaacaaataacgttagcaattgagtgtctacctttccagctgtttgcacttattcatcaatctgtatgcatataaacgtatttaataaagggtttttctacccaaagggtattatacaatatattcttcatctttgccttttgttttcacttagcttgacatcgcaaacatcttttcatgtcacatagcttgaccttattctttgaaacagctgcaaattatattgtgtggatgttccataattgatgtgactgttccttatgaatgcacatttaggttattttcaagtttattattaatataaatggtaccacaatgaacatatatatatatttgtacatatatgaaaatatccttaaaaaaacagatttctggaagtgaaatgctgattcagtgaatatgtgtattttataatcttgacatcagcaccgtgtgtgagagagattcattttgtgccccttcccaaaacaagatattaatgacctctttaaaatgtttgtggaagactattacatttcaatttatatgtccttgattatgagtaaggctttttacttgaatctgtagttgtggtcaattcagctcctccgagaagcagatgccaagatggaattatacaaacaagagctttactggggagaaatgcctctggaaggcaaagagagagagaacaggaggatgccaggagagctccagatcaagaagcaggtctgacgtttgtgcaaggaagagggaagagacaggattgagtaggtaaatcctcagaccagagcacagttctgagaaagccttgacaagaccactgtggaattcccacaaggtcctgcttccccacgaggggaaaacctaggggaggcacagcctggcgtgaccctcacagtggatccaaagatgctctagcttgaggccatcagtcagctcttcccccacaggagtttcttttgaagagaggtctgggcagtgcacctccatggccaccactggaatccagggtttcctctagaagttacatgaccacacctttgcttacttttttactccatctttgttatagatctgcagaaacccttcatagattcggtgggttcatgccttggttttttgttgctgtttcgtttttgttttgtttgtttggttgtttattttttgagacagagtcttgctcttgtcacccaagctggagtgcaatggcgcgatctcaacctcactgcaatgctcaccgcaacttctgcctcccgggttcaagcaattctcctgcctcaggctcccaagtagctgggattacaggcacccgccaccgtgctcagctaattttttgtattttcagtagagacagggtttcaccatgttggccaggctggtctcaaactcctgatctcaggtgatccacctacctcgtcctcccaaagtgctgagattacaggcgtgagctgccgcacccagcccactccttgttataggtgctgcaagtattttgtccccatttttgctttcttttatctttggttgcatgtttcactatataggagttttttaacactttaatttttttcctctagcaaaatcttttatttttttttttcctttaaggcttttgtgtcttatttaggaatgctgtcttctttaaatagaaagaaaaaatgggaggcgggtcccattactttatcttatacattccctagctgcacagtacactactgatataaatttagtataaatgattattttatgcaccaaccaggccttgattcagtttgcttctcatcattttcagttttttgctatctaattattagaaaatgtttccttttgaaatgagtggctgggctctatttattcaagtcaaaacccatgatttctcccacaatgtcatcaatgagtttgtacagaagaaaaaatatctttgtgacagaggatgtgggaaagatctggcttttgagaaaagcctatgatgttgctttcccagtgggctgggcctggagacgtatgagacctcagccagtagcaaggtgtggatgggaggaagaggagccctgaggagccggtgatcagagcacccacttccaaccccagaaagctgaagagcctgtcccaaggatggtggtccattctgcacacacctgagtcatctctattgcagcctccatttggttttctccatagcagctctcataagctctaactgttacaatcatggcttggaagcaggagtttcctggcacttcagggctcactcttaggcaagtagacatgggatgtctgctaatcacttgtcaacatggagagaaaaggcccaccctgcaggggacaggccagccacagccaagcaggcccttctactgccccacactttccttattctaccttaccctccaagatgcttactgtcagctccttccaggagctgcctcacagggacagcccagcatgtcccaggatgccctctgccacgcccacccaccgcttaccttctcctaaaccccctcccaagaccacagcaattagccccagacaaatatcattgatctggcactgccttcactcccatttttatgtcaggatgaatttggattctgaagttgatctccttgttgtgcaggttttatgagggaaagattaaatcatcctctgatgtgtgcttcattaggctccaaatccttgaagagtcattaaagcaccttctcattgaaatgctctcaatctcagcttgatgggtatcagcaggaaggatctctccattatttgggacctaaactggctgggaagctgggccagacctgaccctgtcacaacccaatgagcctggcccttctgtagtttgtggcccccaaaatctaccagtgcaacatcaccagaggctggctttgggctggctttcccagaaaagccattcctgcctgtcctctgtggggacaggttgccctgagtcatccacattctcaccaccacccacagctgcaagtctaatctgtgagctgggtagggctcatccatggtcaaggctcagtgtggggccaaggtcagggttcattctggaactaggatcagaatgcagagtgggaccaggatcagagatcgatctgagaccaggattagggctcagtctgggccagggtcaaggcccagtctgggatgagggtcagagctgttattaccagaaccaaggccaacacagtctacatccaggattacacatctatctgtggccaggatcagggcctcgattatggcctagtttatggcccaacctttggccaaaggctcattgacccaaccccagcctggcatcaaccctacatcaacttaggatatcaggacttgacaccttatctaagcacccccagtctcaaatattagcatacccattcccaaccaggtggtactaacagccactgagaggctcaagctatttcaggtgacagaaaacagacaggagtatctgcaagtgagggcctgtattagaaatgggtgggggggatgctggggcagaattggaagggtctagaaggcagcagaagtcaggagtcagggcatcatcaggacctcaacctcagaaacccaagacacagacaaaggagactgcattatttccaacccttcctggcaaaatttaccacatattcatctttctgatttcagcagcagaaagagccagaatctatgagaagggatctgagccaatgccaagtttccttcccatcactgcagaaggcgggaggacagtgaggttgttctcctggacttgctgggtgacctctgacaggttgttctccctctctggacttcagggtattcacctacaaatggaggagttggagtgactcatctgccatgtcccctcagcttggccaaccgcaaagagaatgagaagagagtagcagccagaaggaagggtgttgaagaaggtcgcaggcgagagagagaggatggcaggcccaaaggcctagattaagcccagtgtgactggacacaaagcgaggggacagacgagaggggagggcagaagataggaagtgactaagcccacagggcctggacacaatggaagtcatctggtttttatcctgtgggcaatgaagaaccttgaaggatgctaaacaggtgaggacactgccatatctgcattgtagaaggatctgtctgactgctgcctgcaggacggataagagaggacaggatggctgtgagattcactgggtgggaagattagaacaggattggtggcagaagatgatggtgaattctgatctggacccgtggagttcagatgactgtgggatgtgggactaccaagtgagggtgtccaggaatgaattgacaacatgaaccaggagtttgcatgagccaactgggcctaggttatagatgagggagtcttcagtcattgccaaggataaagtagagggagagaagagaggggaacctggaatggacatgagacacccaacatgtcagcggccaacagaggaagggaagtcagcaagggagcccgagaagggaatcactggagagatgcaggaaaacaaacttcaagaggtggtctacagaaaattagagcaatagcaatattgaatgtggtcaagagcctgagggcatgagaactcaagtcattcaatgactgtggagcccattgctgactttagagagagcagtttctgagacccttcttggggcagcagccaaactgaaatgagtaggagaaggggttgaggaagtgggagtggagataggaagtgtaggcaactgttgagaaaagttctctgtgagtgggatacagtgggatcatagatgggaaggtgtgggatttggggcagagggtgttctaagcagagagactttggggtgtcctaagcagagagagactcggacgtgtgcaaatgctgtgggggaggacccaggagagaagaaattaaaaatacaggaaagagagctattcggggaaggagtgggtcattgagtgtccgtcacttaccatcacacaaagcactttccatatgcctttaatatttaattctcccaacctgtctgtggtttcacagagctgtgctcacttccttcacagcactctgtaaatgattttaattattctttggcttgtttattgactccctttcccactaatcactaagctccacacagggacttcccagtctccatcacctctgtcttatcttgctttgtttcatcatgacacttacactccctgacactgtattatttgttactcgctttttgtctgtctctcctttcccccacaaaaaatgtaaactccagggcagataggacaaagtctgccttgctctctactgtgctcccaagcctaccactgtgcccagctcatagtaggcacacaataaatatctgtgggaagaaagagagaaagagggagagaaaagaaggagtatgagaggagagaatagagggaaagagtgagggaggggaaaaaagtaggagagaaagagaaaaaggaaggaagaagggagagagggaaggagaggcagagaaggaagaaaggagagaaaggaaaggagaccgggcacagtggctcatgcctgtaatcccagcactttgggaggctgaggcaggcagatcagttcaggtcaggagttctagaccagcctggccaaaatggtgaaaccccgtctctactaaaaatacaaaaaaattagccaggtgtggtggtgggttcctgtaattccagctacttgggaggctgaggtatgagaatcgcttgaacccgggaggcggaagttgcagtgagctgagatcccaccactgtactccagcctgggcaacagagcaagattccatctcaaaaaaaaaaggaaaaagtaaggaaagaaggaaggagagagatagggggagaaggaggaaagaaagagagagagagaggagggaaggaaggaacggaaagagagaattctctaagaagaggttctgaaaaccacaacatgctgtccaagtgaaggacaagaagaacccagcgcatgccaagctcgcagcacctgccacaggcatagcttcagctaagcttcatgacaactttcggaggtaggaactactgttcttttttcagaaatgaagaaattgggctccatagaggttttaaggcctgtcagaaatcacacagctggtatgtggtagtgccagagttgaaagccaacgataatggttttgtttttgtctgcttttcctaaaaccccgagctgaattcctgcaccacaagcctctggggatgatcattagtccctccctccacttctcctcaggaccacaggccaaggacaggggctgacagagttcatcgggtgttctagaaccatcccccggctgctgtcctgcagaaggaaggggagacattggtggcagaagggaggagagttttccccagagagctggtggctgggacttagcagaaggacagttgagaaagagatttgagagagaagattgacaggtcccgtggcatgggatgtggggtgggaaagagcgagaggcacgtgaggggctcgcaggtttcaggctggggaaagggcagttgcgctgctgacagctgagacacagaaaatagaaagggtgcatgtgggaagggaggtggcttccatgttggacatgctgagcaagtggggttggtgggacacccatatggtagtgtccaacagcaagctctggggagcagtcccagctggggagagaggcctgggacagtcagtgcagccctggatcgatcgtaggggtgctcttgctgagggcagcatgctgagcatggggctgtatcagccccgtgggccccaggagagaaaagcagtcagaggagcaagcagtgggtgtccctctcagctatgcggggcagaagcaaaagacaagatgaatgagctgctctgtgtgtttgcatgacagaatattttgcagcctccctggataaacaagctgtcatccaccacccaaccctctgtcaactgaagcagcttggggaaaagataatgctgcgggtttggactctctcctaggctgccagtgccctaattactacacaagcaaaacaagcccacagagttgtaggcagagaggggcttgctggccgactagggaggagtgtcactttcccagtcccagggaggggtggaagacaagcactaatgtttattgagcacctactgtgtgccagacacttggcacatgtcatcttatttaatacagttcaagtatcatccccattttgcagatgaggaaacagaggctcagagaggcctgataatgcactcagttaaaggactcactccaaggtcttcccattgcacttcactgcctccctggaaaatgtccaggtttggtttcctctcttctttcccaatcctgcagaatcaaatccaaaggcgtgttcatgactttgcagctctattgactctttttgtttctttctaagacgtctatttgtaagaaataaaattgttgggctcagcagcaggacaataactataaagaaatctgccattagcagcacagactttagctcccagcattactgtatattcaaagtagattcccaaaacatcatttgacacaaacagtcattccaaaaggactccatttgcctccttcctcctgccccgcctcaggcacgcctgaccaaggtcgaatgaagaagaggaaaggaggtgagagaagactccaagcagccaggggcagctgagaaggaactaggctgccctgctaggagatggcagcagtcccctgattcaggggacagataagctgattcttcccaccccatccccttcctgacctgatagatggggaaactgagtttcagagaggagcagcgactggccagtgatgggattagatcccaaaccctttgactcccagcccacagtgatcttccaacacaacatgcagcttcgtcagaggccaagaaatccatttataaggaaattttgtatgtgcatttcatttgtatgatttaatttttttacctcaaaaagaattataatatatagctttcaatgcaaatgggaaaagcttacacatcttcatataaagagaaggaatatccaaaaagtaacaagaatgttcctagtgctgtctttcatagtaaatttgcatgattgtacaccacactccagccacaatgatctttttcttagttcctcaaagcccccagccttgttcctacctgaggaccttttcatttgatattccctctgcccagaactcatttccctaggcttacatggctggatttctcttgtcactgagatctcaactcaaatgtcaccccctctcaacagtcttccctgaccaccctccttcaggtaaccatgctgtcaatccccataacaatgggtgtcaaccctgggcacggtcacttccacctgcatggcttaaaatacagattgctgagctccgtcccccacagtttctaatttaataggcctggggtgagtcctgagaatttacatttctaacatgatccaagattgtgctgatgatattggtccaggaatcactttgagagccaccgccctacaacatcaccctgttttattgtcttcgtggtgtttatcacaatctgaaattatcttaggcatctattcagtttctttattatggcttgccttttttactgattaggagctcctgagagaagggtgactgtctgtcttgtttattgcagtatctccaggactcagaagagaaccaggtatatgataaatgctaaatgagtatttgtttaatgaataaattagtgagtgggtgaatgggcggatggtggagggttggaagaagagggagggagaaagagaaatgaatggatgcatgggtgatgaatggtggatacatagggaatggatggctgtgggtgggcgggtgggtgggtggatgaatgaatggatggatggaaagatgagtgggggggtggatggatggatagatggatggatggacgaacagatggatggatggatggatggatggatggatggacggatggatggacagacggatggatggctggatggacggatggatggatggataaaggggtgggtgtgtggatgggtggatgggtggacggtgtgggtgggtggatggatgaatggatggatgaatgtataattatctcattctctggattcccacctctgtatatgtcatctttgttccactccaaattgatctacaggtaaaaccaatctcatttttgatttccaaaatttcaactgatagaagcaagaccatgaaacattttgccgaggatcttgaggggccatggccaggagacacatatgacaaaatagcaaatgacataaaactgcacacaggcataccgctcttaaatgccctttcagctaccccatcacctgcaagtggtccccagctttctgccatcttgaagtctcctctctcctcctcctctgcttcatcttcctccttttcctgttctttgtcaccttctcaaagatctaaaaataataatcttttgcattttcccatgtagagcagctaaaccatgattttttattgcttgagattcccaaaaagaccagtgcactccctctgtcttcaaaaattcctgcatctttgagactcaggcaagtcataccttcctcctccatcttttttgtagcctcctggaagctatcccttattcagtgaagtctcctggaagctatctcttattcaatgaagtcttcagtcccagctgaatgacttcatcgttagtgactgcagaagacaggtcaactgctgatagccaggtgagaagaggaggtaagaggtctaataagagtgagaaaagctttaaataattgctgtgaatggtaaaggaatgagctggctggagaaacacaagcccagctctagaaactacagttggagttggtaatgagtaagtcaaagaataaagaatccaagatgtgaagagttatccaaatgctttcttctctattctcttagtcactttgttagcttccaattgcttctgtaacaaattaccacgaatcagtggctaacaaggaaacaaatgtattatcttacacttctggaggtcagaagtccaaagtgagtcagcatggctgtgttccttctagggagagcatctgcttccttgctgtttccagtttctggaggctgcctacattccttgggtcacagccccttcctccatcgttagagccagcagtgtagcatcttcaaaacacacacactttctctctttttctctctctctccttctctctctcactcactcactctcccccaccccctactccactccctgatctctacagagcaatatatttgcaggtttcagggttggaacatggcatcttttggagagtggggcacattattctaccagtcaccaactgagacagtcacttcccacatttcaacatcatctggaaccacttcctctaaagtcattaatccatgcatcccaccatggttatggggtttaaacaagtatcgtatttaagagagaaacctttagactagctgcattaggcttaaccttgagcaagtcattctacttcctgaacctcagtttcctaacccagaagatgagctttaaaactaatagaacaactagcagtgttttatttgctatgtgccaagcattgtctgagtggcttgcatatgtcatctaacttaaatctccctagagccctatgagtacaaatgaggaaactgagtcccaggctggttatataactgcctgaggttgaggttggtgatgagcaagtcaaggaataaagaatccaagatgtccctgcaacctcctctccttccagcctgcatgcccaagcaacccattgcagccattcttcaatcttatcaggacctccagactatccacctttcctcttgctcccatccacaagccctgcctctcttcctttcctccctttctcatttggatcctgtgatctatcattactaaaatgcctcacccctccatatctccatcacacctattggcaataacccaatcttggatgggcttccatcttcctcctccatgctgtcactggggaaacactgctggacaaaaccacacaacagtacatgtaaatcttcagtgtccatcacaactttaccatggaggcatgggaagactgagaagccaatggagggtgttaagcttggaagtgactccatcagaattgtggaaaggtcacctctgcaacaggatggagaacagattggaggaaggaggcagggagatgaaggagtgaccccttcaccccagcacctcaccttattctccatgctcggtggttgttcacacttagcattgtattagtccgttttcacgctgctgataaagacatacccgagactgggtaatttataacaaaaaaaaaaaaaaaagaggtttaatggacccacagtttcatgtggcttgggagacctcacaatcatggcggaaggtaaaaggcacgtcttacgtggtggcagggaagagagaatgagaacccaggaaaggagtttttcctcataaacccatcagatctcgtgagacttattcactaccacaagaaaagtatggaagaaactgcccccatgattcaatcatctcccaccaggtccctcccacaacatgtgggaatcctgggagctacaattcaagatgatatttgggtagagacacaaccaaaccacatcaagcatcctcctcctttcctcttctctaatattcctgcagttcctcatatcactggtatacatgtcttcttccttggctagacaggcaagacgcttaaacaaaggatctaagttcaagtttaatcttttcactgacaagttctgttaacatagacatttacttcatctctctgagcttcaatatcctcatatacttttgacactcaacagaaaaaaatactgaatgacttaaacctgtgatcaatagtgctacaacattcataaaaagtgccttgcaaaccatacagcaccctgtgattattacctactatcattatccctagtttgtagttgctttgaaagcagggttcaaaacttacttgtgtttgcctccatcccacccttgaggaataaggaaaccactgggtgtcacactaatgaacatttaaagaaagtgtaaaacaacaccaaggctgcccttttaaagccttctctttccccttcccaaggtgatctatgctctggtttgatttttctctgctctgaacgatccactctaacccatgttcagaaattagtctgtttacacggaggtgcctgcctcctgatggcaagctcaaaagaccaaacagtgaagcattagaaggccctggtaaacatgaagatcttgagaattcgattttgatttattgaacaggataatccagtgccattttgttcagagagtttggttaacactgctcttctgaggttgttatcccaaattccctggagatcccagaagtgaggcctcttctcagagccatctggtcacccatgtttctacaactacagatggtccctgaatgatgatggttcgacttacaatttttttactttaccatggtgtgaaagcaatgtgcattcagtagaaactgtactttaactacccgtacaaccatgctgtttttcacgttcagtacagtattcaataaatatgtgagatattcaacactttattataaaatgggttttctgttagatgatattgcccaaatgtcagctaacgtaagtgttctcagcacgtttgaagtaagctaggctaagctgagatgttcggtaagttatgcattttaaatgcatttttgacttacactattttcaacttacaatgggtttgttgagaagtaagcccatcataagtgaaggaacatctgtacctccttttcccattaggggcagaagcaattactacccagatcactctcgcacatccaggcacaaaattgccttggaattacttttcaattttaagagaccctggagcacctagcccaggagctgtcactctctgcaattaaggggaaaaaaaaaaaaaagaaaaccttaaatgatgcactgtttgccctgttgggggaagaaagaagcaaatagggcttaatcaatccccacctcaggattagacctcagcagctttgaggcttggacctactgagtgattctaggtctggaaaatttacctctgagtctcccaggcttgcagcatcacttgggagggcactgcagctgtttttccccagttagttgccagagtgtccaaaacagtcatggaggggtggggaaggtgttgcaactggaggggtggcaaggtgttgcataacgactcccaagagagtggcaaaggccatcttttctcatcctaggcatcctaggagcctgtgcatctagttctgtggcagtattctgtgccatctcatgctctgtgtaactggcttcccttcctgaaatttaaatctggagcaaagggacaaggaaaccacaaaaatattggggggaaggagggtctatcccatcccacactgttcctgcttcctaccgttagaagctgcctcaattcggacacctcgttttccagcccctgcccatttggaaggctctgacagcatccattttgtaagagttcactagaattggtttctgaaccttttaatctggtccttggggaaagcagaaccatattctctgaattctcctctgtgtttccctatgtgttgatgaaataaacatccagcaaagaggttgacttcttggacacatttgccccagatgatatgggactgaactacttaactacttcccctttccctctgcagcacatacgcaccaatgtaccaggtggagaataactactctctgtcccaggcccccaggggcaggacagaaattgctgatatagctgcaacctcagtgatcttgcctgccttatgaatttcactcctactatcaattgtttaaatagtgagcaagaaaaatgactctcgaagtaaaacaatttggcaaaagcaactcatggtctttagctatctccgaagaagcagagtcaacccctgcaccactgagatgcatcacagtaggggttcccggaggacgcaaaatgcaactcttatctacaatttgggacccttatttctgcctgaagttctttctattcatctcaaggagcatcacaacattcatgtaactgtgattaatcaagtatatgtggaagtaaatctacccagctccccagctctgtgtttctcttgccctgagagagagcctaccatcttcctcaatgaactcagagtatagtccatcatccaacagacagccttccactaaggatacccaggggttcccaaggcattctgtacaacacttctctctagtggtcagagtaggctaactgatatgatagacaacacccaaagtctcagtggcataacacaaggaagtttgtttctcatatcacagtacaacacaggtcggttggggaagtggacatttctactccatacagtcattcagggacccaagccctttccatcttgtggttccaccctcccctaaatacttgaagttctctccattttgacatcagatgatgaaagagatagaatgttgagaattgcatgggtgatttttatggtccacattgggaattggtctaattgcttctgcccacatttcacaggtcagaactcagtcacacaatctcatctcattgcaaacaagtctgggaaatgtagtctagctgcatgcccatgaggaaaaggaatggggcttggtaaataaaggaatgccactgacccctagcagtgtgtggtggtggtggtgtcgggtcctgtctcctctgggatgtgagctcttcaaaagcagaaattgattttatttttgactctctgactgatgaacaccagtctatgaacccaggctgaacggtccagaaggtatcatctcagaggtggagctgaagtcacagctgaccacactgcccaactagctgccaggcacctggcacacacaggcagattttgacaaaggccatcagctgggagcctgacaaccacagcagacccagagagtttcaggcacagaggcagggagaacctagaagaaccctaagccaagaaaatagctttctcccagagcacagagatttctgggaagggcaccaacccagcttggacttagggtttataaaggactgcctcactcatcaatgtgttaattctcatcacaaaagagatcaggccttaacatacctactttacagatgtgggaatagaggagctttccccaagtctaacagcactagaaccgaagtctcctagctaaggaactgcatgaacctaccagactattctctatgctgatcacccatgagcattcaaggaaacatcccttagggacctttgggaacctgagaagcccatacctcctctggaagtattccgtgctgtctctcgctctgtgtaaccaggtgaccacgtacgcctggcaatgagttacatcacccagatgtgttttgaggaatctgtttgttttcaaaattgacttaaataaggaatgtttaaacatgtttcttgtttttaatgcaggtccttattttaagtcatgtttaaaaatcaaaaaatttcacataaaaatataaagctgtgggcttttcttttaaaaaaaaaaaaatctcaggaggcccagctaccctgagtctgattcccacaaggcgacgctcacccagagctgagtaggcgctgttcccagagacaagatatgtgtcctccaggtccccacaacccccaccttcctatttttctttttggtccatgttattcatttaaatcactctctggcctttctgagcatttgagtttgtaatccctgtcctatttatgctcaagtccttgatcatttatcccctcaatcattcatctatacactcaacagttgtttgctgagtggttgttctgggccaggtttgtgctggacagcaatgatgaaaataagacatgaccctgccctcagagagctcacagtctaaagagaaacacaaatgaagaaacacatccttgtaaatgtattaagcgctgtgaaactcatatttttaaaagttcgtacagataccattggtgcctgacccacatcgcctgggcactcaacattcccgcgcaaggagatagtttcctactatgagcacctgccactctcccctgagtgtctcctgcatgcaggctagaagcattggagagtgaatgtccccagaaacagctctcaaccaatgactaaccagagttggtggataaataccccagctcacccctcaaggaggaaaatcatgatgtgtgttttatgatgtccaccagaagttccccagttgccaatatcggtaagcttctcggtaaagtactctatactttcccttccccatcccacttcccctctctcctactgtccctctctccaataacctccccagtcaaccacttgcattcccacccttgtcttaaggtctgcttgtagggatgcccaatctgagacacgcaccagtaaccacctgggaagcgcaactcttttaagttcgtttaactgaaatggaaatgtactgccaattagcctggaatgggtcagggaagaaatctaaacaattcactagctttcctttaaaaagtaatcataacaataatcaggctaatgaatgctgcctgagcaatggcagggactatgtgctttagcacctggggctgctgattgccgtctctttggggacttgctgcacattaaatcagattaatcagcccctttgcagagaggccaggcccacagccatgatgaccttcctttcaatgaactcctgtgatgctgcttttagaaagaaggcaggcctgaaaaaatcatggagtagatcagaactcaggaaaaactgatgttatttcatcagttcctctcaacatgccttggagggagacaatatcagcttcactctcaggggatgggggtggcaacagggacttggaagagtcaggtgatttatctgagttcacatggtccaaatccaccagactctacgcccacacaactgccctgtcaccaggctgtatgtgtctgtgttttcctgtgtctgaagactgggatgaggagggaaggaaagagcactaagacctaaccttgggtcttagagcaggggccacagtgctgggaatggccattagcctgtaggttgctgtttccctctggtccagaaggtgaccagagaagaacaaaggcaaagtaggcagtgacacagcaggaagagaatctggagcagaagaaacaaagaggatacctttttcttttgtgggaagatcatgagcaagggttcaaggcagctcagaaatgtctgggggtgctttatgagggattaactctttaaagaaactgatgaggccaggtgcagtggctcacacctgtaatcccagcactttgggaggctgaggtgggcagatcacttgaggttaggagttcgagaccaccctggccaacatggccaaacgctgtctctactaaaaatacaaaaattagcggggcatggcggggtatgcctgtaatcccagccactccggaggctgaggcacaagaatcgcttaaacccgtgaggtggaggttgcagtgagccaagattacaccactgcactccaacctggggtataatagcaaaactccgtctcaaaaagaaacaaagaaaagaaaaggaaagaaagaaggaaagaaggaaggaaagaaaaagagaaagaaagaaagaaagaaagaaagaaagaaagaaagaaagaaagaaagaaagaaaagaaagaaagaaagaaagaaaaagaaagaaagaaagaaagaaagaaaaaatgaaactgatgaaagttcatgtgctaacatttggatatacatagaaaatgaaatatctttgggtaataatctcattatgttgtcacaggcagatgaggccaaaaatatagggttctgctttcttgagcgtatgtaaagactaggcagcaacgtacataaagggccagcaccaggcctggtacttcagtttggctccatgaaagtttgttcactccttctcacccctttcccaattctagcaaattggaagctccccagcctgatttttcagtgctaatgtctgccttccagaatcccagactgcctgcttctatcaagaagccatagcaatatttccaacccatcaacacttaaatatgaggccaatttgcccaatacactgtctatttattttccaggctacaatctttatgatgcatattcctgaggcagttaatttgctcttgaatacatctctttgtgtattggttacccatttcattagctgtgatattgagactggctgggacatgtaggggatttttcacagagtgaaagaaggtttttaataagccccatcattgctggctttatggtgccatttgatgagcaacaaatgtattcatttggcagctgcattccttaatcaggtattcactgagtaacagcatatataaatatggaaaaacacagaatttaaggagctgagtgcaatcattttccacagggattggagcattgtctgtattcatcatcagttttcaggcaagggcctctccttgctgtatatgggattctctacagcatgcagtacccagatatgactcactaccatctatcaggagcacctcttctccacctgagatgctgtcctctcttccacatcaaacaagtccccagcatcttgacttctttggccaatggtactaaacctttcctgtggctcccatctcttttgcccttaaaatgtcccccagaaaaaaattactaaaccaggttagctcttaaacataaaatgtatcctaatgattagagcaagaaatacactttcagtttcttaatttctcaaattattaaaaattaaaaatacacaactctttcaaagtttgctgactcagtctccaacttatgttcagtcacacttaagaagtaagacaccgctgcctggagtggctcacacctgtaatcccagcactttgggaggccgaggcagggagatcatttgaggccaggggtttgagatcagcctggacaacacgatgaaaccccgtctctactaaaagcacaagaattagccaggcatggtggcaaacacctgtaatcccagctacttgggaaactgaggcatgagaatcacttgaacccaggaggcggaggttgcagtgagccgagatcatgccactacactccagcctgggagacagaatgagactgtctcaaaaaaaaaaaaaagaaagaaagaaagaaaggagtcgctttaataaatagtcaaattagtgtcactacttgcatttaagtggcttccaaatttagatataatgtttaaaatgtcaaaaagattttatcacaaagtaccttatggttgcaaatggtacaatgattcaccagttatggaacagagttgagcagatcaggaaatcagtcttccgcttgggttcaacaattgccttgtcatttaaggagattcataaaccaagtgaaaaggaaatggattagaaaaccacatttttctggttttaaaatgaataagcaaatctatttctttttcttctctgaaacttactagaaacatggaaaagggggaacaatagcagatatttcattcttgttaaattaggaagcacattaacttatttgttttgtaaaaagagagctgtagttataaatagtactaacagtaatgtaataatagcccccaaaccccatcctcagcatatggaagttggtcaaacacagtcaacaattggaccagggaagaaaagacacctgctgatgaagggcaggtgagccccaaacttggggattagcttgagaagatccttggctttacccagtaaagaattcaagggtgagctggtgatgtttacagcaaccttttattgaacagtactgctccctatagaggagggctaactctaggcagtgctcccagagttggcaatgtatgggctctttacaactgtatttatactcacttattcctactttcagttatacgcaaattgaggggtgggttatttagaactttctaggaaagggcagtaacttctgagtcactgccatggaaaggggtggtaactactaagttgttgccatggcatttgtaaactgtgatgatcctgtcgcatactaatgagcaacggtggtggccagggattgccctcctcatcatctgctggtttctgccagtttcttcactttatcctgtccaaagcagatcctgttttggtcagcagggttatgaccagaaaagaagtccagccagtctcctacttcactgccacagccaatctcaggcagatctagcagaacacagcactctccaaaatgggatgcacaccttgggggaaaaccagtgacctcctgtttgaactagtaagattgcaatgagcagaatgtctttgaagagtttcctaaagcccgatcaacaccaggaaagggcagaacaagcaggtctgaataaggaaataagcagacaatttcacaagaaccaggagaaagaaattctaggtaataaacaatcctatcatttctgaagggaagtaaaagctaagactcacacatacacacacacacacacacacacacacacacacacgtatgttccaacatccaaccctatctcatttgggattacactgtgggccagaaagagatctttctagcctgcctcatggcatacctctgactcctgctccatacagcttttccacaaatagcttctaatctaaactgctctcagtaattatcacaacggaaattgcaacaatatatgaaaacactgagagaaacaagagggaaaggaatatacaataataagttgaagaatgcatactaaaaaatgtgtaacaccaagcagataaaaatagtaaccaaatagtttcctgtggactcagggaacatagagaaaaaaggtatctccatgaatcaagaacttaaagcagaaagacaagagctcatggaaaaagtaataagactacaggcagagatgaaaaaataactccagagctttggaagatgaaaaaacaattgcagaaattaaagttgttttgggagaaagaaaagaaagagatatactgaaaacacagtcagtgaattgccaaccttgagaaaattgagcaaaatgaaaagtaaataaagaatttaaagatatcagagataaaatgatggatatggaagagagacaaaggagattcaacaaagacataattggtgtccctgaaaaagataaaatagaatttaaaatttttcaaagatactatttaagaaaacttttctgaatgacaaaaagcttaaatctatagcttagaagaacatactatgtcccaggaagaaaataaaacagatgaatctatactgaggcataaattaataaggttactggactaaaaatttttaggaaaaaagtttcaatagacatacagaaaagaaatttttttaaataccaagtaatctgtaggttcaaaacatttagtttagcctctgacttttccataacaatgtttaaaactagaacacagtaggcaatatctacaaagtcttcaggaaaagaaaagctgatcaaagatttataacctagcaaaatgtcagttaaatttaaagatagctagtattgtttaacatgcaagggaataccattcccattagcacttcttgaagaaattaccagaggagaattttaaattttccaagagttgaatgaaaaagttatgttaatagaacttatggtgagccctgaaaatgcttaagtgtagaacaaaggctaaagaaccatggagagatacagaacaaaacagaaatgctatagggcataacagcataaaaatgataatataataaaagtcaggagggaaagagggaaagaaggcaggtataagcacactgaatacctagtttttcttaatggggacggcagggctcacaatatattgttcaaagctaataaatcaattaattgaagaataattgtattaaaagttctaagagaattaataataaaaatattattgataggccgggtgcggtggctcacgcctgtaatcccagcactttgggaggctgaggcgggcagatcacgaggtcagaagatcgagaccatcctggccaacatggtgaaaactcatctctactaaaaatacaaaaattagctgggcatggtggcgcatgcctatagtcccagctactcaggaggctgaggcaggagaatcacttgaacccgggaggtggaggctgcagtgagccaagatcgcaccactgtactccagcctgggcaacagagcaagactctgtctcaaaaaatatatatatgatcgattaaaaataaagtgttatagatgaaggaagagaggtgacagaaggtacataataagtgttcaataaaggttatgctgtttcttcattgttcacactggggtgtaaatacataccatctaggacagagatactagtttccctccaatattcattatctcctccttttaagtagtagaatcccaactttcccagaaaaaggactgcatttcccaggctcccttgcaactgggaatggtcatgtgaccaagttctggccaacgagatatgagccaactaaatgtgtgcatcatctgggaaagcccttctcttcctctttttccactgatatgtagtgaggccacttggatcacccagatgaaaacaatatcctgaagacggcagagcaccaagatagaaagaattgccctaccactttgactttcacataagagcaaaatcactgtcttatatagcagcagtccccaacctttttggcaccagggactggtttcatgggaaaaaatgtttccatggatgcagggttgggggtattgttttggggagattcaagcacattacatgtattgtgcactttctttttttcttttcttttttttttttttttgagacagtctcgcactgtcacccaggctgcagtgcagtggcacaatcttagctcactgcaacctccgtctcccaagttcaaagattctcatgcctcagccacccaggtagctgggattataggcacacaccaccacgcctggagaatttttttatttttagtagagatgcggtgggtttcaccatgtcggccagggtggtctggaactcctggcctcaagagatccatcaacctcagcctccctaaatgctggaattacaggcataagccaccatgtccaggcaatttctatgattattacactgtaatatataatgatataattacataagtcaccataatgtagaatcagtgggagcctggagcttgttttcctgcaactagacagtcccatctgggggtgacgggagacagtgacagatcatcaggcattagattctcataaggagcatacaacctagatctctcacatgcgcagttcacaatagggctcacgctcctatgagaacctaatgctgccactgatctgacaggaggtggagctcaggtggtaatgtgagcaatggagagtggctgtaaatacagaggaagcctcgcatgctcacctactgctcacctcctgctgtgcagcccagttcctaacaggctatgggtaccctgggggtccagggttgagaccctgtattacatgagacatatattttgagtctccatcacatgccaatgaacctacagtataacttaactaaattccgtcttaaaaagaataatgcattacatacttaaaatcaaatattatttagccataaaaaaatgaaattctgatacgtgcatggatgaatctttaaaacattatgctaagtaaaataagtcagatgcaaaaggacaaacattgtatgattcctttcatatgaggcagctagaataggcaaatttggagacaggaagtagaatggtggttgccaggctggtgggagggggagctattgtttaatgggtacagagtttccatttaagatgatgaaaagattctggaaataatggcgatggttaaacaacattgtaaatatacttaatgccactgaattgtactcttaaaaatagttaacatgataaattttatgtcatgtatattttaccacaataaaaaagtcagagaaaaaataaaacaggaaagaatagtcaggaaaattctttttaaggaaagtcacagggaaaaacagctatgctatctaatacggtctcaaggatcctgcccctgtggcgctgccctgtcccatacagaacctctagtcattatgtggctatttacatttaaatttaaatcaattaaaattaaatgaaatttaaagttcagtttcataatcacactgtcctcatttcaagtgctcaatagtcacactggacagcagatatagaacatttccatcattacataaagttctgtcaaacggcacttgtctagagcaatctccttcctgaattttagactcatacatccaactgtccatctgtgtgccttacaggcactccaaaacaaattcaagaacttctccatcaattcctacccccaaaattcctttctccttctttggcattttctctgtatgtaaagagtatcatctggccaggcgcgagcctgtaatcccagcactttgggaggccgaggcaggcagatcacctgaagtcaggagttcgagacaagcctggccaacatggtgaaaccccgtctctactaaaaatattaaaaaattagccaggcgtggtggtgcgttcctgtaatcccagctacttgggaggctgaagcaggagaactgcttgaacccagagggtggagattgcagtgagctgagattgcaccactgcactccaacctgggcaacaaagtgagactccatctctcaaaaaaaaaaaaaaagtatcatcttcatgctggttgttcagatcagaatcttttacatgacccctctctttcccccaacgtctagtcaactactaaatcttactaattctaaaatctgtctgtggttctgtggcctcttctctgccttcactgtcacctgggtgtccacacagtctcctaactggtcctccacgtcctttcttgccttttgcaaacagcctcttctgcacacagaagccagggaaagatttcaaaaacaccgatcagattgtgtcagttgtgctaaaaatccttcatgggcttcctgttgaccttaagacaaagtccaaaatcttctctttccacagccctgcatgctctgcctctgccgcccacttccctgcccaccaccccatcccctttacaggcagtaccctagccacagtgagggcagcaaagttcctcctccaggaacactcttccacactctatcccccatcgcctggctaactcctactccaggtcaccacccccaaacagcttccatagtaagtaaggaggggggtactttaaggcaccaaagatgtaattgaacccctaaaaactccagtcaggcctgcgatgtgtccctcctctactcactgctgagcaaacagtgaaatccgttagaccgaccacaaacgaggttgaaggccagggtgtgtgtgtgtgtgtgtgtgtgtgtgtgtgtgtgtgtgtgcagggcttccactgatagagaaagtgtaacccacccagctagactgtcagggcaggaatcatgcctgcttgctgctgtatccccggttcctagagccatgcctggaacacctggatcctcagtgcacgttaaagaaaggattagtcaatcaagggccttgttctctgcccacttacttctaagctgtaagtgaaaattctcagatgcaccagcagaccaggagatctccccgacttctcaggcccacagtgatctttctgagacaatatcgccactctccaagccccaaggggagaagatgggcaaagaaaggagaatggcgaggataaaacagcagatggaggaaccctattccagctgctggcagcaatgaacaaggaaaaccaatctcagtttggaaaggggaacgtttgtagggacttggccaggattataatgaaaggaggaaattcttcaaatgttatgaaaataacacaatatttttctcatatctggaactgcctgaacctttcttacgatagtcacaacatcaaaacaagccctggatctataagaggcaggataggatctctaatctgtagagagctgggaggcccaaggccatggccaaagggacacaatgaactcaggtgtcaatggtcttatccagaaggcagtgtacgtgggccagagcccaggtaacaggagataagatggcaggtgagtagcagctctgggagtctaggtatgtggtccttgctcaaaggagtagatgggtaggaatcaggagatacccatgcagagtgacagaccaatagccaacagcccatctcctccaaggagacctccctgacgtcctctgcatagtaaagatggaggtacttttaggcacaaaagctgcaactgaacccctaaaaattccagtctagggcccctggactggtgaaaagtgacacttctctgataaatttttgcagctctcagggaattagctggcagtgcttgagggcagccagagagctggtaggagagctggtagcaagtgtccctccccagactcccacatcccctacagttagctctacagtggccctcccagccatctcaaacaccgagagcttctaattggcaggaaccacatctcataggatgcacaaagtggaatggaaagggaagtgtctgccattcaggtaggttgtttggggaggaaaaaagtgactctgcgatcaaaagagagagcctggagtcttgctactcaaagatttgctatttcatagaccagaagcatcagcatcacctggagccacgttacaaaggcagcatctcaggctccacccagaccttctgcatcagagtctacatgttaacaagctccccaggtgatttgcatgttcattataatttgagaagcaacaggctagagagctgaacttaggtctttgggactccaaactcatacatctttgaacacccgcatttccatggtgctttgaaaatcatacagcatgctggcatgttttctctttatgcttccccagcctgaatagacttgagcaagggaggaagacaaacaggaaaagaatattgtgaaagaaactagaactcattaatagagtgcctactccaagccaatcacaatgctggaagctgtcccgtgcattctcttatgaagtcatgaaagcaagtgctgaagtcaggagaataataggcaccattttccagatggagagaggctgagaatggttgagtaactttaccaagttggtgcaattaggtcttgtttagctgcgagaaacagagacctcatgctaactcaagcaaaaaggtggtgttgtaaagaaaatagattacccagaatcctaggataggaaacacaagaagaccaaatcctaggagcctgaaagtggacagcacctgtctgtttcttgccctgagatggggattcttctgcaagtaatttactcatggaggctctcaggaggaagggagagagggaaacaggacaaggaaagggaaagaagccaagcaaggatgtcatacggggtggagaacaacttcgccctgatgccacagggagctcaagtacaaatggaaccacagagttggtcccctcttgagataaggaggctggtctttagtgccccatgtcagccagtcactggcggcagcttgctgggggaggggaacccaccaacctggcctgaatgccattaggccaaggatttctatggacaagggacaactataaggcattagtggtcaacactctcagcagcctgagggatggcgcacctgcccagtgaaaaggaggtgcactggcagtgcacgcgtgtgcatgcatgtgcatgtgtgcgtgtgtgtatgtacatgtgtgtacatgtgtgtatgtgtatgcttgtgtgtgcatgtatgtgcattgtgtgtgtgcatgtatgtgcattgtgtgtgtgcatatgcaggtgtgtgtgtgtgtacatgtgtgctcatgtgtgcgtgtgcatgtgtgtacacgtgtgtacctctgtgtgcatgtgcatgtgtgcgtgtgtttctctctcccagggacaacctctactctagcatgaggcatctctgtatctccttgtgcctggctccattctcacctgtgaaggcagttctccttcccccacactgtcctcttctgccttctaactcgtttgcacacgtcttaaaacaaccagtccagcccaccaaggcctcttgaccaaaaggtttcaactccgcaacctcattgtttaagcctcttagccaaattcctgagcgagaaatccaattagccacaccagtcacaggtcccagtcaacagacagaggcaccctgaagtcacatgtccactccagccatcagctgaggactcaaactacataatgaaacacaaccaagagaactggggaataagcctgttctttgaaagcttcaagtgaaacaggctgtgatagaaatttctagttctgctcattggctggaatgcaaactaacatttctctggcaccagagttgtgttcctccctcattacttcccctttttagtgtaattgttcagaacaaaactgtcttggttcaaatcccagctctaccactagctgctcataaaacctcagacaagttatttaacttctctatgcctcagtttcctcatctgggaggtaacattaatacctgcctcgtagggttgttaggaggattaaatgagttagtatttgtaaagcacttagaataatgcctagtgcatagtaagcataacagaagtcactgctaaataaatggatacaataaatgcatttttccagctctcagcaggaaggcagagatgaacggggtagcccttggaatggaagctgaccagcactccagaaactattgacacattgagctgtctgggatggagccctgggagacagacagcaatgttaccagtgtggcgtgggcaagaaagatggtgctgttccctttccaggaactcagctccatggcaacttgagctggctggggcagcatggatgtcaaagctcatgagaatccctgggaataatagcgaccaatatttctagcattctgctgtagataatataggtgctttttatgggttgaattgtgtacccaccccccccccgcaaaatttcctactcagaggtttgctatttcgtggaccagcagcagcagcataacctggagctgatgttgaagatgtaccccctcagaatgtgactatatttggagacagggtctttgcaggggtaatcaagttaaaatgaggccattagggtgggccctaaccccgtatgactggtgccatttttaaaaaagggaaatttagatacagagacacataaaaggaaaatgggccaggcgagatggcccacacctataatcccagcactttgggaggctgaggtgggcagatcatctggggtcaggagttccagaccagccttgccaacatggtgaaaccccatctctactaaaattacaaaaattagccgggtgtggcggcacgtgcctgtaatcccagctactcaggaggctgaggcaggagaatcacttgaacctgggaggcagaagttgcagtgagccgagattgtaccactgcactccagcctgggtgacacagccagactccgtctcaaaaaaaaaaacagaggaaaatggtgtaaacgctgggaaaagatggtcatctacaagccgagaagacaggcttaggcagatcttcccaacatggctctcagaagaaaccaactctgccgatatcttgatctcagacttctagcatctggtaccgagaaaacaagtttctgttgtttaagccaccagtttgtggtacttcgttatgcagccccagcaaattaatacagtgccttagtctgcaccaggcaccatgctgttcacttcacaggccttagctcaattatcctccctcccatcctgtgaggtagaagttgtgctgtcccacttcacagaaaactcaagcacagagccagtaagtactgtctacaatcacacagttaggaaaatgcagttctagaccctgggccatcatcgaactgaacgatgccttgcacacaggaagtactcatgtggcatgcgggaagccctcacctgacaagcgggaagccctcaccggacacatgggaaacactgacctcgcacgtgggaaacactcacctcgcacgtgggaagccctcacctggtcatgctgctgccactcctctgttctacctccctcttgagaccaaaggcctcactaacaaccagtccatcaaagctttgagaaggagtcaaactgccccactctggggaatatcaggtaagaaaccaggccccagggagaagcagggcttgcccaaaccctcactgtctcaggctctaagaagcagaaggacctagaattgttgtaggagttattaggaaattattttaggcagatagagaggaaaaggagtccttgggaagttttcattttttaaagcatctctggaaaagtttcttgcaaagccccagctcttagagccaggccggcaacctctgatatgcaaatatagaccattagaaaccgggtccacccaacatggcgactccagccaccttcttgcccttgccccacgtattcctggcaacatggctgcccccacatatccccacatgtgtagaacatcatggtgccccgcatttgcatcttaagaggctagggtgggagggccagctttttctctggctacgtgaatgacatgcctagtcaaaccaatcccctgagccttatgcaaatcagacaccacctcctccagattctgcatatatacctggctggtatctgtggcaggcgggtacctccttttttgtctttggaccccccaccaccaccccccgcctctgtacagggaagcctcttcctgctgccatctcttctctttcttgcgcattaaattctctgctacttaaaacctctccacgggtgtccgtgtcattttatctaaaccggcgtgaggaccaagaaccctggtgttcttcactgatcggagccgtatcacaatcatggcctctttgagtacttcctatttcctggctcctgcactgtcctccagcgcccattctttgttgaatagcccttctttccccaacttggagcaaaagcctctccttcctgagagaaccggagacctactcttaattatccccttgaactggcagccacgtctgaggcttttcttcatagtggaaaactgccttgcatcaaactaaaataaactcacagcccccactgggctttcacatctgagccacagaccggacaatgttattattttgcatgagaaccaaaagatccaccaacaaaagaggcctagcagaggaacatccgagaagaaagagagacggctgcaagcacacaagaggcactgctttctctcctaaattacttctttttaatgtacaaatggtgaggattttcttattactgggggaaaaatgttaatttgtaaaaaacagggaatttttttcaccataaaagcaagaagaaattggaatcatccacaagcccaactctcaaagataaccactgtttataaagaaaaggaattctatttatgagtgcacacagacatgtaaaactggtcctgttttttctactaagtatgttgtaaaaatgtttctgtgctgaatcaaagactgctatttgtgctcatttgcggtttagtaacagaatccatcaaaaggttttatgattgtccacaattcttttaaaaaaccctacttcccagctgccttttccatctagaggtagccatgcgaccaagttctagccagtggaagggatgggagtactgcactgaaggcaatgaagggatatgccctccattgcccacttttgctactttcagctaaagggagtgaagacaaagtgtggactgtcttggatcatgttctataagataatagaagaagactgataacaacatagatagactgataacagaatagactgataatgagacagagggctgatatgacaaaatagactgttaacaagatagaaggcagaggaacaaaatataaagagactggggccctgagtgacctcatggagcagagctactgcaagccctggactgaccatctccaaactgtgaatgaggaagaaactcccattttctttgcttcattataaattgggtcttcttaacagtagctgactctatattctaatacatgtctccaggtctacctctacaatatagtttgaatgacttcgtatttttcatcatatagatgttcaatatcaaaatgtattgaattcaactaagtataaattgttggtcatttctattgcttttaaacttttcataataaataccactgcaatgaatatcctcatacataaaccttgggtgtattactgattatttcttaggatatatttatcgaactagaactgctgggtcaaacaatgcaaacttaaaaaatactttttttttcaagagtattatgtttattgtaggagggtagcttgcttgaacttccacctgaacatccttgtatacaaatttttatttgcataggcttgcaagatttgccccatatttgaattcatttttattatgccctctctcctgtatgtatgggaagaaatataattagtcatgtttcctaggttcatgtgtgtgtagccttagggatattacttaacctctctccattcagcttacttgtttttaaaataggggttctaaaactacccacctcatgaagctatgagaaatacatgagttaatatgggtaaagcttttagcacccaccatatagaaagtgctcaccaaacactagctattattatttttattttctagaattatttatgacagttgctttccatttaacaatatatttagatttattccagttcaaactatttcaactcttactgctcaccattgaaatactgaatttcccattcttaaggtgtttgtttcaaatcctgatatattgaaatgcattttcctgtgcatttttcaggaaaaaaaaatacaagtggtatagtccctgtcttggcatatctgagagtttttgttgttgttgttgttgttgttgttttttgagacggagtctagatctgtcgtcaggctggagttcagtggcgtgatctcggctcactgcaaccacctcctgccaggttcaagcaattctcctgcctcagcctcccgagtagctgagattacaggcacacaccaccaagcccagctaatttttgtatttttagtagagacatggtttcaccatgttggccaggatggtcttggtctcctggcctcgtgatctgcccaccttggcctcccaaagtgctgggattacagacatgagccaccgcatccggccgagaatgttttcaaattgtcttccaataccaatgacctgctgcttggccatagaatttttgaataacattttccttcaaagctttgatgtcctattttcttctgtattcaatgttgcagagaaatttgctgttaacgcagttggatctttcttcctttattttttaaatgtttactttcatatatacttgtaggattatttcttcagccttgaaatgcaaaattttcccaggtggtgaggaggggatggtttctttatgttaaattcatgggaaggctttccatctgtaggttcaagtctttctttagctcagttaagctttctgcaactgcaccgttagatgctgcttctgctgcagctgccaccactgctagtattgctgctggaacaatgttctaggttttgagtctgtgtagcttccccttcatctccttcatcttccctctcattactttcagatcctcatgttctgggagagcttctcagatatcgagtctcgttgacttcttctcttaaacagttcttaaatctgtctacctctctccatcccagctactgccaccccaagagatcttcctgcttctattctcatacctctacaattcattctctgcacagcaagagggggaaaggcatctcttttaaaatgtaaactgtgtcattcttctttcatgttgtatcattcttcagtgggtttttttgttgcatttagaataaaatcgagtcacataacggcctccaaaacactgcatggttcagccttgtgggtccaaagcgatgtttatcagcctttcccactcaggcctgttagagttggtagcattgtaggatgggtgcagagcttggagtggtaggaaaagtctaagaaggtggagattctcttatggaatacactccacacacagctatcaggacaaggataaaaagagatgaagatgcaggaaatgaggcttggtatggaggaataagtcgtcactgttttgaagggccagcaggttccaggtcctaaaagtatttctggatcagactaagaaggtaataaagagtgtatttattgaacatctgctatgaacaaacattgctctacattagcccatttaatcttcacaactttactaattatctccatttttaataaagaaagggatactctgagaaggtgaataacttgcccaagatcccatggctaacaaggagtggagacaaagataaaatgcaggtctgcatgatttcaaaatttctaatctttcccctgtaacttgtgtcctccctaaaatgtgagctgcaacgtggcagctggtgacagagccatgtgaaagtggaaggcttgaataggtcttttagagaaaaaccaacttcttgcactgtttcagagaccttcagcctggtcagagtaggctagataataaatagatcccaaaatgcagcaatccaagcagatattcctggctggaggacaactttttccatgttccctcctatggatccaccagccttgtcatcagaggtagcctcctagaagaaggaggctggtcatcatctgctcttcaaatgcaagaagatctgctgaatgacttcaagatctttagagatggtacagttgctactttgggaggccgaggcaggtggatcatgaggccaagatattgagactatcctggccaacatggtgaaaccccatctctactaaaaatacaaaaagtagctggatgtggtggcatatgcctgtagtcccagctactcgggaggctgaggcaggagaatcacttgaacccgggatgcggaggttgcagtgagccgagattgtgccactgcgctccagcctggcgacagagcaagactcaagtctcaaaaagaaattgcaaggagcctgagtcccagcatggtaggtcatccatcaaatgcccaattgcattatgcttgagcaagaaacaaaacttttactcttgaaaagccactgagatgttggagttgtttgttacagcaaccagcatgagttacaccaaataatacaaataatatcacaggttaaaaaaactaaggctccaaaaggcaaggtgcatattatgtcattctcatgttaagttcagggctccttccccagggacaccctgtcctagtgacctgcagctagtcctggttcaggcttcagctctctatggaactcagggaaattcacttcccctttgggcctcagtttttgcatttgcaagataagggctttgccttagttggtggcaaggggcactctgaagccatctgactactgcccacagcccaaatgcatcattccatagtaacatgtgcagtcaccacacccgttgggtcattgagtcattccttgtaagaagagggtcaaaacttttttccccaaaagagtcattccagcttattatagaatcatctacatttagaatgcctttacagtaaccatggaaacaatagcatgtgtgaggaacaaactttattctaaatctgctgatgaggatgaagaaatggctccttgtgtggacctcagcaggcccagcatggttctgctctctcctctgttggggctcgacttggctgctggccataagcagctaaggccaggaagaaaaagactttcctgggggagatgaccaatatctagactaaattttgcaagatgaaccaaggccttcagtaaacctccagtgatctggaagaataaattgtatttcttttctgcctggcccccattggcccagtacaacctgaaggcagaggacagaatggctgtttgacacaatccatggtaatcacctccaggacacagagaagggaaggggagagtacagcatagatatagagggacaaacagaaggtgcccagcacaccttcagagcactcgtccccccttgtaacttagagggggggtctctaagtccatgtgattatttaaagcctgtgtttcccattcaaccctgacctctattaagagcatgaactgggctcattcctaacagctagcatagcacctgcacatagaaggtacctataaatatttactgagtagtgaatgaaaaaataaatggctacatgactgagcaaactcctcagtatgaagaacacacacacactaactcctctagggaagaccccaggatcactcaggaccctttcttctcaaacccagaaagctgaggaacagctatcactgagcatcaaacatcaccctctattcctttgtcactcagcctggaactcagccctgccccaggcaggggctgagctggttcatgcttccctagcatactacacttctcccactgactcagagctggtccccactacccatactgccagactcagtatagcaagggacctccagcactgctgtccaccaactcctctggcaagtcctgcccacctgccacgtctgacccctgcatgtgaataccagcctaattgacctgaggtcactgtgccccctctgatagtgtggttaagacgatggactacccactgctcaatcctatgccgaattacaccacactccaccaggccacacctagcccagtctcactctctttcccatgtggctactgctgaagtcccagaattccaaatgtcaatttcagcatagcatccaatcagtcaagtagctagggaaagccaggaggggaatcaagatctgtaggctttgctcttggggcaagttcaaaccaataaggtctggctttgccttcctgactcctcctacatggaaaaggataccaagtctgctatgtatagttgtaaaagttgttcactgcacaaaggtgcccagttaaattgaacagtgagggttcaaatccagcctgtgttctacttgccaagctatgtatcctggcctgggctgggtcttcccaacagaaaggatgtcttctttccacttgcactaaggtgccatataggctagggagccaccttgaaacaaatcctactggaaatctgggcaaaaaagttcatgtttaacaggactggggcctggaatagtctctttatatctctgattttcaggaaggctgatggcttcgaggccagtccttcctgtagaaattcattacacaagaaaagaccttctagagtaacaaaagatattgcaattacatttatcaaagaaagcatggcaatcaatgtcttatgcacagaccatgtttcaaatgcccttaatcaatggctgtgctaattacacatttattgcaattaatttcatttcaattctactttaatcattaaccttgagtgagattgggcagatcagagagtttgtgtcaccacagggccaggacccagggataagttgccgtccttcgattgaaagatgccgctccattaaaagttggtttattggctcaaggcctttttgcagggggagggagttagtttctccagggaggcaattcataatgtgagtctgaaattgaacacaggaaggcaggcagctgtgcttacgaattaactagagctgatgtttaatttgcttcttattgatgccatttcctcactggttcattagctgtagttggagaataaatgccttcacagttcattctttatgatgtcctcagcttctgggtcagcctcatttgttccttatcttccctccaaaagagggctctctcttagcctctcctcatgtctaaaggctcatctgtgaatttctggggcagggccttggcttcagtctctgcacagagcagggtccccttggtatctacagtgtctgcccactgagactaccaaggataatgccattgcaacagtccagataggggtgttggaaaataacttgccctgtggcaaagcagaaacaacttgtaggataatagaactcgggctttggaatccctcagaccagggttcaagtccaagttctgatacttcttagctctgtggtcctggtgtagtaggacgagccacagacaaaacccctcagacaccgagttaaagaaggaagggctttattcggccgggagcatcggcaagacacacgtctcaaagactcagctccccaagtgagcaattcctgtcccttttaagggctcacaactctaagggggtccatgtgagagggtcgtgatcgattgagcaagcagcgggtacgtgactgggggctgcatgcactcgtaattagaatggaacagaacaggacagggattttcacagtgcttttctgtacaatgtctgtaatctttaacataactgattcggtcaggggtcgatctttaactaccaggcccagggtgtggcgccgggctgtctgcctgtggatttcatttctgccttttagtttttacttctttctttgggggcagaaattgggcataagacaatatgaggggtggtctcctcccttactgggaagacaggttaatctcctgagtcaggtaagtgtaagacaaccatgcccagcacttggaaggaactcaaaaagttcaactgccttatgcaataaacccttctctagggtttacagcaaccacaccttagcaagattttttactcccaggagggaagacctttctacaaaacatttctttcactagcccaggaggaaggaaatgtagagattttctggtctagaccttcatcttaaagttggggaaggaagggaaagcttgaggtcacattgggagttggtaccagaactggactatagccaagtctcctagttctcaattctagagctttcctaccacatcacaagctagcctctttgaacagtgatttgtcagtatctggtaaagattgaaaatatacaaatatcccatgtatgtgctcatggagaaaagaataaaaatatttactgcagcatcatccatcatcaaaaataagtactaacttaaatagccctccatagagaaacacagagacctggagactaagaaaccagtccttgaagtcaagctgactctgcttttagcctcctaaattaaaagatagatagaataggtcttgtttgcaaaataaattcaagatctactcatctatcaatagcaaaaaaaaaaaaaaaagagagagagagaaatgcagaggcaaattgtgatgtgttcataagttggaatactatacagccattaaaatggatatacctgatctatattatcagcatggattaatttctaaagcataatgtttgattttaaaaagcaagttgcagaatatttatagcatgataccacgttaattttttaaattcacaaattcaaagagattataaatatatccatatgtaatttagatattaaagcataggcaggaagaatataccaacctgaagggagtggccacctggaagaatgggagaatgggatcaggagaagcataaagaggacttcagcaataagggtagcatttgacttatcttttgagaaagatttgacacatattggattaaatgtgctcatctgttcatattgggtggcaagtccttggtctttttgctttccaaacttctctttctgcttgaaatttttatcacccatgaaaaataaaatggttaagctttgatgtagattctctgtctaaaaaaaaatcccgatgattatcacttacggagaacagagactctgaaattggagatggttccaagataacactcaacagcatgagagataggatgattacatgtcccagtttgccagacctaaaacagagcttgttgcatgtagtactcaacaaatatttattgaatgaattaaagaattgaaatataatggataccaataaatgcattttctctcctttcctcatgaaatcttcacaggaaaatcagttaaatggggcagagtgagtcatggaaatcaatgagaagccctttgtctaatcctagactcttggagaaagatgatgatggctgggacaagagtgatggtagtagacatggagagaaagaagcagacaggtttcaaagacaataggtaggatttgctgatggaatggatatggggattaaggaggaagatcacagctaagattctggcttcactattcccttggagaagagtaaggaagagggagagattctgagtttcatcttgaacatgctgtatttaaggtataacccaactttcaaaggggaacacactcccttcagtgccccatccaataccaagaacatctctccctgggttctgtgtattggctcagccctatgccagggccatgtgtgtctgcttgatgccccaaagggctcctagcttctattccttgggttctcaggaagtttcctgtgactcagatgttaattggccacagtcaggtggactttgaagcagcaggtctgccagagcccagcaaggcagaactttcccttttaccttcacattgtcaaactcctgataagaagctgtattagtccatggtggctgtattagtgcattcttgcactgctacaaagaaatgcctgagtctgagcaatttttaaagaggtttaattgactcacattccacaggctgtacagaaagcacgatgctggcatctgctgagcttctcaggaggcctcagaaaatgcacaatcatggcagaaggtgaacggaaagcaggcacttcttatgtggctggagcaggaccaagagagaagggggaggtgccacacacttttaaatgaccagctctcacaagaactcactatcacaagaacagtgccaaaggggaaatccacttctatgatccaatcacctcccaccaggctccacctccaacactggggattacaattcgacatgagattgggtggggacacagatccaaactgtatcagtggcacacccctgtagtcccagctacttgggaggctgaggtgagaagattgcttgagcccgggagtttgaggctgcagtgagttatgattgtgccactgcactccagcctaggtgacagaacaagaccccatctttaaaaaaaaaaaaaaaaaaaaaagccgggcgcgatggttcatgcctgtaatcccagcactttgggaggctaagacaggtggatcacgaggtcaggagatggagacaatcctggctaacacggtgaaaccccgtctcaactaaaaatacaaaaaaaaactagccaagcatggtggcatgtgcctgtaatcccagctactcaggaggctgaggcaggaggatcacttgaacccgggaggcggagtttgcagtgagccaagatcacaccattgcactccagcctgggtgacagagtgagactccgtctcaaaaaaaaaaaacttctagtaagagtgtttctaaaccgcaccagaaggcttttatccctactgggtctgaccccaaaggggacgcattccaagagcctgttgcctgtgagttacatagaaatatgaaaggattcccggcccctgccctctcagggaacactccactctgacagcactggcatgcacccaacagtcaatgtctgccttcatatccctaaaagagaacagagaggaaaacccttctgtaagtggaaggttttacagtgccagtgaaaattattcaaaaagtaattaacataatcaaaatctttgtaggtcatgctgaaaatgccttttcttcaaacatcagtcttgttcttgggtctcatccattttttttctgtcctgaatagtgtggaaagttggctttctccagatggactcgctgacttttggtggctgcaaatggatttcccaaaggctgtgcacagttggttttctttcagcttttcttaactttcatttatttttcttccatcctcaccctggcattaggccagtgctttcgggttgaataaatttaaaatgccatttttgataattggaaaagccaagcccacctttgggccgtatcacataatgtaaatttttcagatgaagggattataggtcatcaatctctccgctaatacttatccataaatccatcagacaccagcgtatcaagtcctggttcaagttttgtgcaactccagggtgcttccaattatctcaatgactctttcaaacttcttgaaaatttctcaaaacaaatcaaattttcattcagtgtccaattaaacataagtatatgtcattcaagactttgaaacacggtttcttaacctggggtacacaggtctatggatagaattcagtgatctatgaacttgagcaggaaaagaagttacctctttttttcactaatggtctgaaatttagcattttcttgcattatgaatgtagacaacaaaccatagtagcagtagcagaatctggggctttcaccaataaaatccatggatattttcatatcacctaacagttgctacataaatcagatatttttaaatatctacatttaacactactttgaaatcacagtaattattaaactttctgctagcttgctatttaaagtgctaacaaaaagcacatttattacaatatcacaaattttcttaacatttggataactttatttcagtataattgatttcctttggaattctatgtctttttatacatttaaagactctttacagagcagaagttcagaggcctcaccaaactgatgactgcttgggggcttatgcagaagaaaaaggctaggagccctgctttggagggggagaaataggggaaggagggaagaaattcaataatcagagatggagagcctgaaatatgtaattctgttctgaacttcttaaggggaggaggcatctgagaaggaagcattaatgttatatagtaaagaacttggccattcccaattagaggtctgacctttgttccaggctcctggggggtaacctctaaacccttgaaatgtcctaaatgattggacggtgttattcgtggtggcccctctgaccacaccttgcttatgctaacaaggtgactcatggtgggcctctctagggagtaggtgttgaggattgagttcactcttgtgggccatcaaccagtcatgcatatataatgaagctccaataaaaactctggacaccagagtgtccaaagggcaggtgagcttcccaggttggcacggtacaccatccacactgtcacatctcaatgctgagaaactagcacatcctgagggcaatgaaagctatgcatttggagccctttcagactccatcctatgcatctcttcctttggctgattttaatgtatccgtttcctgcaataaaccatatccatgattataatggctttcagtgaggtgagtccttctagagaattattgaaatcttagggtggttttaggaagcctcccgaacttgcagttggtgtcagaagtgaggttggtcttaggaggactctttcctctaacttcgtagttggaccctacctccttgcagttggggtcagaagtcttgggcagacttggcagttgggagatccatgctctcctacctttcagtttggctgaaaggggtaaatgtacatgggaatcacctgaggatcccattagttatgattcagtatgcgtagggtatggcttgagacactgcagttctaacaagcaacaggttgttgcggatgccactgtctctggaccacgccttgaatagcgagctgctaaagcacaaccaatgacatctcttctcagcttgagatcctcagtgggcatcagtgaccaccagagacagtacacacctctgagtatggcattccaggtccttcaggatccagcccctgcattctcttgcagtgtcttcaacccccttggccctagctctgtctccagtggtccacctggaatccaagacctccatactcacatgtcttgtccatccagtctgcttctggccacagccccatctctttatgagcccatccctgcccctgtcccaaagccaggcccagccaaaagcatcagcaatggcaggcagctccagtcttgccctgacccctggcccaagctctgagagctgaactgataccaaggtggaagccctaggcacatctagcaggggaaaggccaactcttcattttctacctcagtccctatcaggttatgtgaggagaccgattcctttctgttcctggactccagttccttatggacagggttgaaccctaatctcaaaaacctagtggcctagtcccagctcctggagcctgactttcctgatgccagccacctgtccagactgctgacagacaactgttgctgggacacctgctgttttctacctcttcctcagcctttgtgtggactttgagaattcatttttgtattctacctcagattagaattctaactgagaattcaattttgtattctacctcatcctcagccattgtgtggactctgagaattgctgccacctcttgtggatatttcagatggtggttcaagaatactcactctttgccacccttctccttgggaaggacatagttctcactgatgttcagcttgctcatatgatttgctctggcctcatggaggatggagtgtactttccctgacccttggcttcaggcttagtctcaggactttctttgtccaatgggacgttagcagacataatacaagaagaggcttgacatgtgcttgtagagttggactatgcactcttgcattctggtgacctgcagggagaagaacacacccagataacaactgcccctccagcctgggatccaggatgaacccatgtggagcagatctgagcagatccacattgagaagtgtagcccagccagatccatggttcaaagcccaaccaacatccagtaacccttagctatgtgactgggaattttgggagtggtttgctatgcagcaatagctgattgatacacttgggacatgtgtgcttatcccatttgactgaacttcctgggtccccatctgctccaagtcagttctcccagaacctaacccacatcaagagcaaaacttgtgccagttcccaacctttctttccactttctgtgttcctattttgcttctcatttcctgtgtaatcctggagaaaaaatatttaacttctgtgaacctcacttctttagggttgtaggtaatactagatataggtgtttgttaactctctaggacaattctaggcatacagaagatgtttaacaaatagtagtaagtcagccattccaggctaattcctgagaaacaggatgggcaccactccattgaggtgctagagaaacaacccaaaccctaagctggagactaattttacattttcaacctcccatccttgggcttgtttcttggttcccagcattctcatagcacttgtagttccctactatgatgtgtccactctcatttctgtcttctctgctagattagaggcccttacagacagtaactatcacttactcatctctgtatcctcagcctctgtttagcacagtgcctggaatagagtgtgtgcttaatagatgtttattaaaagaatgacttagtcatccaatgaatcaacgaagaaaaggaagaaagagagggagggagagagagaaaaaggagaggaggaagaaaaagggagggaatgagcgacagagggagggaaggaaggaagaaagaaagaagggaaaaaggatatacaaggatttggatggatggttggatggatggatacagggatgggtgaggatgtctgtacctttcgaagggtagataacaggtgactgcatggtttatggatggatgaatggagcccctcatccgtggggatgtccaatagcttcacactggcttctttttctatcccctctagctctcactcattcctctcctgtcacaggcaactcctgggtttaagtgtccttttgaacaaataacaaaactccaattggtgtgtgagcgcttctagcattctaattgtgaagcatgcttctgaatgacttaggagctaaggggagcttgaaaaagcctaagatgctgggagaaaatgagaatcatgacattttgaaaaggaaaccaattttctctaactaaaactgttgcctctgtaaaccatattataaatccaataaattcacataatgctatggtaaatccctcacaaaagagagaaggaggggggaaagagagagaaaaggataagaaaaatcttacaaagacttccaaagtcactcttctctttaaaaacaattgctttgatcctatgttactaactacctgaattcaaatacaggctccaccaattccaaggaattaactttggcaaatcactgaacctctctctgcctcaactccttcatctataaaatgaagatagtaatacctacctcattacattattgtgaggattattgagataatataggtaaagctcttaggaacctgccatacacatagcaagttataggggaaatgcacctgagagcattaagcacacgtttagaatgatcctgtatggcagatgcacctgaatgtgtgttccaagctaggaaatttgggagcggccaacccagagattcatcccttgactatgataagcatctgagcccccagtctgtcccacggaacacaggctgtacagggattgaggccctgagttttgggataaacgaagtttgccaggtagaggtcattaagggaagagagttaactgaaaatactaatatattagccgattttttgataaaagccacttgaggggtaggggagtgggaaagtggaggggtggggagtgggaattgttaatgagtacaaaaaaatagttagaaaaaatgaataaggccggacatggtggctcacacctgtaatcccagcactttgggaggccaaagagggtgaatagattcaatccaggagttggagaccagcctgggcaacatggtgagaccctgtctctactaaaaatacaaaaaaatcagcaaggcatgaaggcacaggcctgtaatcccagctgcaagaatcacttgaacctgggaggcagaggttgcagtgagccgagatcgtgccgcttcactccagcctggatgacagagcaagactctatctccaaacaaaaagaataagacctagtatttgctagcacgatagggtgactatagtcaaaaataatttaattgtacatttgtaaataactcaaagggtataattggattgtttgtaacacaaaggataaatgcttgaggggatggacaccccattttccctgatgggattatgcattgcatgcctgtatcaaaacaactcatataatccacaaatatacacatctactatgtacacacacaaaaaaaggtgtttttccctatctcctttgaataaaaagcattgtctttctgataatagaaagaaggattgaaggaaaatgcatataaactgcatgttgtttgcaagcagttgcagtttccttgcccagcctgccatcactgggctgtgtggttatgtcgtccagcccaccatcactgggctgtatgtaaggtggctatcttgtccagcccaccaccactgcaccatgtgtgtatgtaaggcagtctcctctccaacccactgccactggactctctcctccgttaggaagcccctaataaaaccccatgcctcaattgctggctctgggtctcttcttcagcctcttgaacctggtgccttccctgaggttaatagggatttggcacaatataagtgtataataagtgtgggcaattcttattactattactccctacactcacagtggaacacagcaccaggacctggtgacctagggaccatgagtagatcccacactgctccaaagacattcgtcctcctcgacagcctcacatatcatcattctctaccctgatcacccctaatgatcctgacactaactcctcccaagtctaatgccaaacatcatgtaacccaaatgtggatgtgggccatgtgggcaaggcttcatacagcattatattgtgagaaagagccaacacccaaaagtaattcaaaataattgaaatattacttggtatttcaaagaaatgtcaaagggagaagtacattctgaacacacaaccataaacatctttaaaatttttcctatcactgctgctttcaatattccacacacagcatttacccaaaactccctctctccttcacccaccctcaatgccggaccatgaagttcttctatttctcacccccttcatctcttcccatatttgttcttcattgggtagatcaacttaaccttctcacatcttagtgcttctctccatttctacctggattacctggattctaaataacaaaggtaaacccaggagctgaccaagtagaccagaattcttccccatagaatcagggaagatgttaaaaatactcattcttaatttttgtccctgctaaaccaagttatctgaaatctccatgcctttgctcaagctataatatttcttctgcctggaatgcacttcacttttttttttttttttttttaagagacagagtctcactctgtcgcccaggttggagtgcaatggcgccatctcagctcactgcaacctctgcctgccaagttcaagcaattctcctgcctccgcctcccaagtagctgggattacacgtgcgtgccaccatgcccagctaattttttgtatttttagtagagacagggtttcaccatgctggccaggctggtctcaatctcctgaccttgtgatccgcccaccttggcctcccaaagtgctgggattacaggcatgagccacatgcccggccacactccacttcttttaagaagcctttggtaggccagtctctctgctctgagagctgggagtggctgggagtgacttggagatgcagaagaggcagaggctggaagtctgaggtctagttttggtagctggctcacctccagtctgatttggaaatgcagaatgtgttcccacaaagcctgaaagaccactggcctggtatgtggtccaggggacataatgtcgagtagagagttggactagctgacccccaaaaaatcagattctgtggtattcgtgacagaacaattccattgcaggagaaacaggccaacattggcagaagagttggccatagccaccagttgcccctgtggtccttatgaggcaagcagctcagatttggagggtaatgcaagctcctccagaccagcaggtccatggtggcctctctacagccccatttccaccactgctccccatcccacaaagtgtggagcatggagcccctagaccagacacctttggaagaacaccttgaaaaatctcatctttcacacagcagtttattattttcaatgaattgttaccattgtcctcaccaccgcctgagaccaacaggagcagaatctcagctctgaccctaactccatgtgactttgagtgtgccacttctcctctctggggctcagttttcttgggagtttatcagtcaggataaactaagtgctatgctatgtaacaaacaagctcaaaaatcgatgcctttatactgcaagcattgatttattgctcatgataaataatcaaagtgagcctgtgagaggctgtgctctacatagtcacatgggcagccacagtctcctccaccttgcagctgcaacacctggaatgtaaggcttccatattcacatggcaagggaagaactgcattagactggaattctaactatctgagaagtgacacgcatgagccctactcatatttttttagccagaactaggcaccttggtgccgcctacctctgataacagaaagaaagaaagaaactgcaatataaattgcatgctgtttgcaagagcaaacagggagccaagaaacataagacaacatatggaatatctgcgtagtaataccatctctgccacaaggtgtgataatacttctattactaggtgactagaaggattaggtgaacaatcgttttgcaaaaaggctttcaacatttaaacctcagaaaatatttattgtgcagctactatctcctaggtcttgtgcttagtgccaggaacacaacagtcatcctatcctcgtggagcttactgtcttgtgtatgaggcagacaaaaaatcacctaattgcaccaataagagtgtcactaaatactgcaacagatgctctaaagagagatgtgtggtgatataatatgacagagagccttaattcatccgagcagtccaggaagacctctcttgagctaagatctgaaggatgggcaaggagtaagtagatgagcagttaaaaagaaggcagccagatgtggtgtgcacctgtaatcccagctatacaggaggctgtgacagaagaattgctcgagcccaggagttcaagtccagcctgtgcaacatagcaatactctcacgtcgaaaaaaaaaagagagagagagagagacagagacagagagagaaggtggtgcagagtgttgttggcagatgaaacaatatagacaaaggtccagtggcaggaaaggcacagcatgtttgaaggactgagaaaaagctggagaggcttgggtacagagaccaatgcacagcttggaatgagaggtggtcaagttcaacagagacccaaccttgtgggctgaaacaggatttatttgtcctttatcaccaaagcaaactgaggcaacatggttattatggtcaccattcccactttgaagaagtgtaaattgataccctgagcagccaggagacccatctagagtcaggagaggaggtgatattctgactcaccctaaccactgtgtggccacctccaaaagcctcaggacaattcaggaccaagaacattctctcccaccacgagaagaaacatttccttcctggagtaggttccacatcccatccagtgatgtgtgtaaactcacaacattagcctgcgctgggccagccccatgggccaggacaggttgaggccaagagatggggatagagatgactggggatagagaccccagtcactttcttttcatctcagcagtaccattattttatcatgtgactttgcgcaagcaatttccccttcccagccctcagtttctccatctctgaaatgcaggcattgaaccagatggtctctgaagtcccagcaacaggagttttaggtgtattttccggctgagtaatgaagggggaaagtgagtagactccaaaccagtctttatctggagaactgcaatttgccaaacaagaaaatcaaggggaaattgcaaagatgatgagggatggaccttttttaggaacaacaacctaatcacaagtcactgctagagaagaaatgtcacaaaaaccttgatttgcagctttagggagcagcgtgccatgggatacaggcaattaacaacgtgagaagcttccccaaggctcagatgaatcatgaacggcagtgttgatgggctggaaaggatgccaaacagcacatgatcaaaatcctagcctaattcatgaagtcctgtggagctgtcctaccaagcagtcatcctgcatctgcctagacaacccatgtgatggggacctttatacctactccccttttgcacagtgcccaacagagtgcatggcacacagcaagagctcaacacatatgtttgaacgaatgaactaattaatcaatagctgcagtgatgtccctatatctctcctggtacttttatctgtgggttctagtgctactctctagtgctactctagagcacctctgttctcgtgactgcctgtctcaggaagagatccccaaaagtagacatttattttggaggtgtttttaggaacccctgttgaggcggaggaactaagacaggttagcaacagaagccaacaagggatgtgttaatgaaaaggctaccactgtgggcaactgtagctcaatccttctggaaaacctctgggagatgatatagaattctgctagccaactcagcagccaccagccacatggggctgttgggtatttgaaatgtggctagtataaattgagatgtagaataagtgcaaaatacacaccggattttgaggacttggtatttttaaaaagtgtaagatatctcagtaatgatttttatattatgtaagattatgaaatgactatttttaatatattgggttaaatatagtgttaaaattaatttcacttgtttttcttttttccttttttttttcttttttgagactgagtctctctctattgccaggctggagtgcagcggcatgatctcagctcactgcaacctctgccccccgggttcaagaaattcttgtgcctcagcctcccaagtagctgggattacaggcgcccgccaccatgcctggctaatttttgtattttttgtagagacggagtttcaccatgttggccaggctggacttgaactcctgacttcaagtgatccacctgccttggcctcttaaagtgctgggattacaggtgtgaaccaccgcacccagctaattctttctactttaatttaaaagcatgtatgactcacacttatggctcacatatttctattgttcgatgctgacatagacgataccttagagttatcccacccaaggggtgaggaagctgggtttttacccacccatttatacccatcattggttgagtactgctcccaggggtataaaatccttagtatttcaacctggcccatgcaccagtgagcttctgcagccagagaaaaccctcagccagagttgcaagaacttgtcataggaacatgttcaggaatgaagagtgcagggcgatgtgggcagagcactgctaccctgcccaacaaaaatctgatggccatatctatgtcctgccctcatgtcccagcctctcctatccaaagtgaatggcccaatttctttctacaagtccttctcataaaatttgctctctgtcccctcagcttctggactgccttctccaaacacataccagttggtcactgtcctttttacagggtgctggttgagatggtctatccattcacgggcttcttagccctcccgagccaaggaccccttacagattctggtaacttcagggaacttctcccctgaaggaaattctttttaggccatgtgcaccattctcgcaaaattttgcattgcactttcaaagggttcacaaccccagtgtccatacataggcctttccaaaggtcagtgaacccaagattgaaaaccccagctctaatgcttgtctgacttcttttattcctccactacatatgttcacatctttctttctgaatgctttcaattttcttagcagaaaaggaacgtagttcctaaagctgcaagtggaggcaggcaccccagagtgatctgctggccatagataaggagttgctgagcgcttggggttaccccccacgccaatccccattgactcactggctcctaataaacagctgatttgtgaagatgagcctcacaggcaaccaggatatcaaggcagagaatcctctgcccacagggcacagaatgataaagccagaagaggccaaggacatcagcatatgttatgcatgccagcaaagttgagcttacgcggcatgtcattgatccttgaaataactcagtgaggtatgtggggctctcatcttcattccacagatgacactggaatcaagatagagacagtacaactcagaggagaggagtttgcccaagaacacataggtagcaagaggggaagccaggacttgaactaacatcctctgagtcccagccctatatccctttatccccatcaagttgctcctactggaggaaactgctggctgtccacccaagtccagctcctcttactccacagtagctgtgattgggacatggctgttttgccaggaacagcagtcccagcttctctgcaggccagggatggggtatgagtggacacaacacgtgccatttctgtctcacttgtttacgaaaacatgtatggtccttatggccctgagtttgcacatttttctcctcctactgacaggatggcaataataaaagtgaccttggaagccacataaacatggcagagtcattaattaataagactgggatcctgaacatccatgtggagcaaaactacctgctgacctggaacatcccacctctgactgttatgtgggagacaattgacttctttgttctttaagctacagtatttgggagtcttttgttctagcagctgagccttttaccctaactaatacacacccctagggagcagagtagggaaagaaacttacatttaggctttctgaggccctcccagtttcaccagatgtcaagatggcacataatatgaggccttaatttttggcctcataccacgccacagaatgatccctaaggattacaacatcatcagttcaggcgacctcaatatgtacaggatctcagcccagagattacagaatctcagaacccaacacataagtgctcactgctggccccagtgggctcagagctgtgattcaccctgagaggggaaagggatggaaacactctgttatttgcttattccctactctccctccttcctgtatattaccctgcctcagctaggtcaaaagtccccaccccccactgtttgaatccctcattttcctcctttctcctatgtgcaaaacaaacatacattaatacatctaccttttgctcttataagaaaacgggctctgtaacacagacaactggttttggcctacagcactgaacacaggagaaagccagctgcccgtgataagggtccatccatcctgggaccctgccctgcagacccctgcctcctgcccttctgtctggttgctcccagtgaccggctcagccaatcagagggctgcatttctttcggcactggcctttctcaacttctagaatcaactccaggcttgagatgccatctgggctgaacccacagaaaaggatgaacttcgtcttgcttttaacatagctcaggcatccagcacataatgaccttcaaaaccctgcacctcacagaaatgatccccatgaaggcatgagtggatacgtggccactctgctggggtatgaacttccgggtgccatgctccaaaatcctcctcagctgtctcattccagctgcattctggagcccagaccccatccagctcctcaagctgctgtccagtgctgatgtggagtgctgtctgggaaccatcgccttgcccaagtgcatctagaagccttcctagagtgtggctaaatccatgttgtttactggggtgtccctccttctagacttattaaatccactttccctccattagaaataaggaagtgagtcagagctgccacttcaggcacccagggacaatgaatgacccccacggtccagagggaatccataaaccagaaaagaaaattaggatctgacttcctggagaagcagagatgctgccaaagctctgccctaagttatccagtgggtggcctactgggaacttaatcatatttgggttttttttcctgaagtaatcttccctatttttggttagtggggtgtaacacctctggaaaggaggggaggccaactggggcggttctgatgactaaaacccgatatgagtttgcaggggctgccccagaccgggtagtttcaacagaaatttattttctcttgattttatttatttttattttattttttattttttgagactgagtctcactctttcatccaggctagagtgcaatagtacagtctcggctcactgcaaccttggcctcccagtttcaagcaattgtcctactttagcctcccaagtagctgggactacaggcatgcaccaccatgcccggataattttttgtattttagtagagatggggtttcaccacgtcggccaggctggtctcaaactcctggcctcaagtgatctgcctgcctcggcttccccaagtgctgggattacagacataagccactgcacccagaccattttctcatgatttcagaagctagaagtgtaggatcaaactgttggcagggttggttttgttgagccctctgtccttggcctgaaaatggccatcttctccctgtgtcttcacagggtgcatgtacatatctgtgttctcatctcctctagaagaacaccgctcatattggattagggtctacccctatgacttcagtttgccttcattacccctttcaaagtcctatctctaaatacagtcacactgtgaaatactgggagttgggacttcaacatatgaatttgaggaggttggagagacacatttcagcccgtaacagaccccacccattccccttgggagagggtcagcaagttcagcatgcccctagggctgggctttattttcctggaagacccagaagtcctgtcatgggagtcgagaatcagaaggagcccttctgtgcaagacggtctcaaggaggagagaggcagtgccctgagagggagggtgggcggagggaagaggaaggggcactgaattggggaaaagacgcctggtcaccacgttttaacagggatatgaataaattcattgtgcctaaggaagatgaacagactgtgaaaaagccttcaaaatcacaagggacatttagcttgaagaggaaaagacatacggagtaaaggtctctgttttcacctccctgaagaaaggtaatcaatgtgccccagaggacagaaccaggacttgtaggtagaaagcaaagagaggcatgcttcaactgcaagaaaataaaagtgttccaagcagtgaaatatttgaccttggagtaaactgctataataagtagtatgctcccttcactcacagtatttcagtcgggctgaaagatcatcggggtgcctagaggagaagttttcatgcacttctcaaattctatgatgctccaaatcagagggttggacaaaataattgtgcttaaaacctgcccttgtggtcctcttgtctcatataacacttagcaatctctctctttgcagactggctgaaatgcaatgagagtgcctgatgacacataatttttggcacagaattcacgacattcatctcaaatgtccaagctactactataaattaacagatcttcacacacacacacacatacacacacacacacacacacacatagctcatctcaaaagtgtgagagaacttccgaaccatgtgagaaaaccaaggcttttggaagaatatggctctgcgtctgtcaagtcaggaatccatccttctagaagggcacggtagtcagaggaaagtcccctctcctctaacacacacacgttgatgtccacctcctaatccccagcacctgtgaatatggtaccttacaaggcaaaagggactttgtaggaatgattaagttgaaggactcttagatgggtgacattcccctaggttatttcgctcctccagtcgaatcatgtgagtcctcataagcagagatgcctctcctgactgcagtcagagaaccagagaggcgcagcaggagaagaacttggccacaagccaaggaatgcaggaagcctctagaagctggaaagggcaagatgatggattcccccctagagcttccagaaaagatgcaccatgtcaacattctgatcttagcccagtgagaccaacatgggacttctcttctctaggactgcaagataaattaaatacatttgtgtttttaaaccacttgtgataatttattagagcagcaatagaaaactgatacaaagagtcaggcactctgaaatcataaaacaaggattcaactcccagtcggcagagtcctagctgtgcaaacttgggccaattaattaacctctctggatctcaatcggctgctaatggggccgttcactactctcaaagggctgatgtaagtattaacgtagataataaaccactagtaacgtgtctggcacagacagcccagcagatgttcccatctcttcttttccaccttatttgctcctagcctactgtgttatttgcgtcattgctccttgggaaatgaggaaactgggttccaggtaagcccgaagataggcacaataacatgcagctgatgaaagttaaagtgggatttgcagtctggcttcaggaagccccacttggaggcctgctcgcagagcagccagagcaaatcccagccacagcacaaagggctccaggaaccacattcttagagatcactccaggaggtgccctgggggcagtggccaatgataaccaggagcataggctgtgggactatactagatcaagggctaagatttccctagggtcaaggtgttctgattcaactggactgcccccggcccccaggcttcatacagggtgctggtgaggaattgtccaggtgtgcaggaatgcggggaggtgtctactggtgatctgagcagtaagagcagcctctgagggggtgatatttttaaaaaacaggatcttgctgtgtcacccaggctggagtgcagtggctccatcacagctcactgcaaccttgaactcctgggctcgagctgtcttccctgcccccaccctcccccttccccaccccccaccccccaccccagcctcccaagcagctaggaccactcgggacctatgccaccatgcctggctaatttttttttttttttttttgtacagacagtctcactttgtggccaaggctggggtgaccctgctaatggagctggcaatgaactgcattttggaagctcaagcagtcactctcgtccaggtgagcctgaaaagtgtcgtcactgacatcgcaggtcagagcaattgaatgaactgtggaattcctgctgtgagtctgttaggctgcaggatccaggatcctccacccttatctagttccaaaactttttatcaccccataaggaaaccctgtacccagaaagcaatcatagctctttgaccccctcccctgacaaccactaacctgctttctggctctataggtttgcctattctggatatttcacataaatggactcatacgatatgtggcctgcggtgtgtcttcttgcacttagcgtaatgtcttggaggttcatccacattgtggcatgcatcagtacttcattccttgatgtggctgagtcctatttcattatacttaatttttttaacaagatgttccacattttcattttgcaccgggctctgaaattatgctggtcttacgaagctctcttacggggttgcagaaaccggtcactctcaactggccccttgcctccccgccctcctctctccatgcaccctccactgtgcagccaaaatggtcttccttggacgaagcctaagcatatcatctctgtgcttaaaatcctcctgtgactgacacccatcgccctcacccctaccatatctcggccccttggctaaaggatccagctctacaaaggagccaggctgtagggaacctccatgccttcgcccatgctgccactcagcctggaaggccctccccccactgccccccttcttctcaaaattgactccaatacggtaactctatgattctaaggtcttcatcctcaagaatgaggtgaatggttaaagggcccttagctcgctaatgacaaagatgcaatttgcttcaaagctgaccttcaggaaagaggactaaaaaaaatagatgagtcaatttaatcttctgcactgacacttccagggaccatagaatgaacttacaagggaacttatgtaagttcctttgtgagatataaataagcacattaaagtattcctgcttctgtccagcttaatggccaagaaactaattgtcagaaatcggaaaggagctgaaataaatatgggtagagtgctgcttgatattatgaagaaatctggcccaaaaagtaaaggcagggacgcagataggggatgtccagctgtccagtgggcaatttttcattgtggtcatgaacttttttctgagacatagttttttgctcttgttgcccaggctagagtgcaatggcacaatctcggctaaatgcaacctccgcctcccaggttcaagcaattctcctgcctcagcatcccgagtagctaggattacaggcatgtgccaccacacctggctaattttgtatttttagtagagatggggtttctccatgttggtcaggctggtcttgaactcccgacctcaggtgatccgcccatctcggcctcccaaagtgctgggattacaggcatgggccaccgtgcccagcgctcatgaacttctctgctttctcacataaaccatcattaaacagtagctggcaccacctggatgccacttcctgccaagagtcatgagggcatggtgtgcaggggacagtggggaccctaaggtctagtgctcatccatctggcttgtcctctcagtagcaatgtcctctagggccaaggactcctgacaccagaacctcaactgacagcagttgcatcacaggtcagtctttgtggctgggcacaaacctgcaggctggacttcccagctgtcaaggccaccccctgccccctctgtcctcccctcctctctcacctggccccggatccccacctccaagatgttgctctatctgggtgatcatctcctatcttcagtctttcccaccccaagattccttctcgcccacccttgaaggtgcacatctcctgaggtgggcaaaagccccgccttgactctgcctctctcccaagccagtagctcctctccctctttgaccaccccctatcaccaaacacagtccatccttcctcacctccctgcaggctgcccagctccagcctcacactccacagtccttcatctacagaacaatacgatccctctgaaacatatctggaccaccactgccctgcctgaacctcccaggagactttcactacccccagaagagggcaagtctcaagctgggcattcaaggaccatgttgacctggccgccctcacttcttggctgtcagacaccctgcagccactcctcccccacttttggccttcaacctctctgagtctctgtttccccatctatgaggtcagtggtttggaccagctaatccctgaggctcctccacggttctaaaaaggaaacacagcacacacgcatgtgcgcacgcacatacacacacacacacacacacacacacacacgtgggcacacaccacttaggctttgttctgagtacctaactgcctcccatagaaaactcaagaacaggaggtgaggatcccagcggaagcagtgggcgcattctctctcgtgctttttttctctctgctttcaatgtattttaccatcttctgaacaaaaatagcctgtttgattccctatgggaaaaaatagaaaagaagataagagtcaaattagtgtccactctcataaaatttttttttaatggaaagagaaggagataaaaagcaaaaaggtagagacatcaggcccacaactcaaccagaaaacttagctgcccatggctggagatccagatggggccagagaaactaggaaagttgaggcagggataaatccttgcctaaggtctgggctccctattgggaccctgctaagaggtatcataagtcatatatatatatatactttaagttcgggatacatgcgcagaacatgcaggtttgttacataggtatgcacgtgccatggtagtttgctgcacccatcaacccgtcatctacgttaggtatttctcctaatgctatccttcccctagccccccaacccccgacaggcccaggtgtatgatgtccccctgtgtccacatgttctcattattcaattcccacttacaagtgagaacatgagtgtttggttgaactcatccttcttcatggctgcatagtattccatggtgtatatgtgctacattttctttatccagtctatcactgatgggcatttgggttggttacaagtctttgctattgtgaacagtgctgcaacaaacatacatttgcatgtgtctttatggtagaatgatttataatcctttgggtatatacccagtaatgagattgctgggtcaaatggtatttctggttctagatccttgaggaatcgccacagttcttccacaatggttgaactaatttacactcccaccaacagtgtaaaagcattcctatttctccacatcctctccagcacctgttgtttcctgcgttttttttaatttttaaattatttttatttgttttaccatatatttatgggatacatgagatgttttgatacaggcatgccatgtgaaataaacacatcctgactttttaatgatcaccattctaactggcgtgagacagtatctcattgtggttttggtttgcatttctctaatgacagtgatgatgagctttttgtcatatgtttgttggccacataaatgtctccttttgagaagtatctgttcatatcctttggctgctttttgatggggttgcttttttcttgtaaatttgtttaacttccttgtagattctggatattagccctttgtcagatggacagattgcaaaaattttctcccatcctataggttgcctgtttactctgatgataaagagcttctgcacagcaaaagagtcacctattttttagagcaacactgacacatatcagctcagacgtagaaccattccttctctcttggtttatcagataggaccaagagctcacctgccagtgggtggaccaattctcaaaatataaagtatataattctttatactggaggaagagttcagcatatcttgttctcttcttggtcctcgcagttgcactgatgtatgtctggccttctggggaagaaagaaggttgagaaggtgttttggggtccctggaggactgggaccctgattgttacctctgggtagtgggataggggatgtgcaatgaggaacggagtctttcagtcttgtactttgttcacatcttaattattttattctttttcaattaacatgctgtagttggcttgagtttttgttttattttgtttgcttgtttttttaacatacacagagatgacaggcgaggttttattttcaaggttcttcaaagaaacaaatcaattctggaaggccaaattaacttgctggccatctccagtttgttaaactacagtcaataacaggggttggcaaaccatgacacacaagccaaacccagcctgccgtttgtttttataactcctgcaaattgagtgtttttttatatttttaatgtctctttttaaataaagaaatctatctcataatatgacatgtgaaaatatgaaattcaaatttcagtgctcataaagttttattggaacatagccatgcacattcatttacacattgccaatggctgcttttgcactccaatcaggaaagactatatggcccataaagctaaaaatatttactatttggcctgtacagagtttgccaatcccaacaacatcctgttgtctcaggtcttgaagagttaagaacacattaaatcatatatttaatcaaacatcttgggtatatttttgcggaactgtattggaaacattacttaaggacttcatagtgttttcttctctgtaaatttttcactatggaaatttttttaacatattcaatagtagacagaatagtataatgatccccatatactcaccacccagcttcaacaattattatagtattaatattattttgattaacatcaatttatggcagacctagttttaacgataccccacccacttacctttcctgcattattttgaagcaaatttcagaaaggatataatttcatctgtaaatatttcacagcaaacactgttttaaaataaaattttacaaccagaaggagacggtgacaaagttgtgcgtaataaggaatttgcagcagaagagtcatgagcccatggaggaagggggtgtgggtggaagacacactttaaaactgattgagaaatgcacgtgtggcacaccacatcttccaagcaaaactcctggctgatagacaatcaccatgggaataggaatgtctctctcccatctattgtgatcaatgccaagaaaaggccgggcgcggtggctcacgcctgtaatcccagcactttgggaggccgagatgggtggatcgtctgaggtcaggagttcaagaccaccctgaccaacatggtgaaaccatgtctctactaaaaatataaaattagccaggtgtggtgacgcatgcctgtaatcccagctactcaggaaactgaggtaggagaatcgcttgaacccaggatgcagaggttgcagtgagccaagattgtgccattgtactccagcctgggtgacaagagcaaaactcttgtctcaaaaaaaaaaaaaaaaaaaaaagccaagaaaaatggatggagcaagggacaaggaaagggagcctgttcatgtaattaaagactgggaaggagatagacaagctgtcagcttcatgagttcctgaaagctgggtgggtcaccctggcagtgagtgatgtctgatctttctcttcctttaatagccagggtcaaccctgaacaaaggagaagcaagctgcctttgtgagtccagggtccctctttggactttttcccctctgtcaccccaagaacccaaaagacataggggaaataaggaagaaagagaagagtcacatcaacggtcaggactgcaggggaggtaagtgaccttaagagaagaggcagcattgaaaaggtaggaggaggccagaggccgggtgtggtggcttacacctgtaatcccagcactttgggaggccaaggcaggcagataacgaggtcaggagttagagaccagcctggccaatatggtgacaccccatctctactaaaaatacaaaaattagccgggcatggtggcgtgcacctgtagtcccagccactcaggagcctgaggcagaaaaatcacttaaatcgagaaggcagaggttgcagtgagccgagatcacaccaccacactccagcctaggcaacagagcgagaatccatctcaaaaaagaaaaagaaatgggaggaggagaagcaggagcaagagaagaggaaggaagcttcccaggggggatcaggcccaccaggcagtgcactctgtttacagagggacaaattaaccagattagaatcctgagagccaagtttacatgtcaacatggccaggcaatagtaccgttagtcaatcagacattaatctgagggttgctggggagatattttgtacaggtggttaacatctacaatcaattggctttaaagaaaggagattatcctacataaggtgggtggatctcatccaatcaattgaaaggtcttaagagcaaaattgaggtttcctaaagaaagaaattctgcctcaagactgcaacatcagcttctgcccaagagtttccagtcttccagcctgccctacagatttcagacttgccaggccccacaatcatgtgtgtcagttccttgaaataaatttcttcatacacacacacacacacacacacacagagtatatttactgattctgtttctctggataactgacacatatccttaatctttctctccctctctgactctatacagttgtgataataataattaataatggccaggcacagtggctcacatctgtaatcccagcactttgggaggcaggagattgcttgagcctagaagtttgagactagcctgggcactatgatagcatgtctatgctatcatagacccatctctaaaaaaacaaaaaacaaaaaaaagaaaaaaaaagaaagagaaaagaagaaaacaataagcaataatacccaacatttattgagtacttactatgtgccaatgtgccagatagtgttttcagtgctttacctatattaactcacccaatcctcacaattgccccatgagaatattattgtgcccgttttacagatgaagaaactgaggcacagaagggagatcactgtgagcctatagcaaaaggctaatggagcctgggaacacgggcaaaaagggcatttgttccttcactgcaggctcacctaaggtctagagtgcagttctctacccccactggaggcaagaggatatatccttggacacagggtagacaggaagaaaatcatcagaaaccaaagcagattgtactaaatctttctgattctagcatagcagcatcaacagagcacaaagtcatctcaataaattatcccatcacatttgttataccacagtgaacattttaatatagtaaatctttccattttcttatttacactttccttattttatcttattgacgttgtgcttgaggagttcctaattcaaagatacctgactcaagccttgttactagggaagagggagtgagaagacgctgcagacgtccagagaagcagacagatagtccacgatgccaaagaatctttgctggaggaactgcatcaggcggggcctgagaaccggtggtttctcgccagcatccgtcatccggctgtttctcagctccggctccaatctggagaccgagccatgcctgtggatgcttcccaagaaggatctggtggggtggggcggaattttttttctccctcctctcccttgaaaacatatttgactgctttgcaatccaaacgcaaacagcctgacaatgtgctgaagtgccctgaaatgcagggagctgggccatagagaggttcagaggagggattcctcctgcaaggcccttggacaggagagccagggggtctctcaataagggggccggcctgcgggaggaccttgggaatacgttctaattttctaatacaggaaactggaagagccaaatgccttgggaaagaagggtttgttttttaaactgggagcctcatacatatatatgagattaatattttatcctataagaaaagtctacagttgggagaaggcagtgggggtggggggcaaaaccctaacacaacatgtgccatggtgactgctggaaatgcagcccactgggcacacaacccaagaactctgcgtgcatgctgcccctaggctgggagtgggctttgggtgagctgtctgttctcccggccaggttctcacaccagcctccagccagcagaacctagggatatctgaaaaaatgtcccctcagcacgcttctcttcagcccctcaattgcccctaagctcttcccaccatgcttttcaaccatcccttcttttcctttctacccaggatactgttctttgaagcttcacggttaagccagactgtgtcccactggtctcttggcgggagggtctccccattagagctccctgagagggactgcaccctgggaagttcagtctgaggagattccatcccatccagctggtcttcccttcccctcccctccctttcctcttctccctctcctaacactcactgacaatctactcttagcaggcactgctctcagggctggagaaatagtaatgaacaaggcagaccaggtccatgctcttcttaatcatttgttttttgggggtgtgaaaagttaaagtagaggttcctcttcaaagagactttcctgtctaattaagaataaataataacttctcttagaagcaaaatttagtccgggagggaggtggggggtcagccccccacccagccagccgccccgtccgggaggtgaggggcgcctctgcccggccgcccctactgggaagtgaggagcccctctgcccggccaccaccccgtctgggaggtgtacccaacagctcattgagaacgggccatgatgacaatggtggttttgtggaatagaaaagggggaaaggtggggaaaagattgagaaatcggatggctgctgtgtctgtgtagaaagaagtagacatgggagacttttcattttgttctgtactaagaaaaattcttctgccttgggatcctgttgatctatgatcttacccccaaccctgtgctctctgaaacatgtgctgtgtccactcaggattaaatggattaagggcggtgcaagatgtgctttgttaaacagttgcttgaaggcagcatgctcgttaagagtcatcaccactccctaatctcaagtacccagggacacaaacactgcagagggccaaaagggtcctctgcctaggaaaaccagagacctttgttcacttgtttatctgctgaccttccctccactattgtcctatgaccctgccaaatccccctctgtgagaaacacccaagaatggtcaataaaaaaaaaaaaagaagcaaaatttactcaaagacctgtgctaacattactaggtatctgctagctgtaataaagaaatcaacgtactttgtgttctttgctcccacaatttgccctggcatgcttaatactagtccacgcaagattaggtcatagcctgtttgtcttccttctttggaggtgtttttacctttctcagcattccacaagttacttcctccttcctttgttttcctctgcctttgcctcttttagaaggttccaagttgctagccaatcgggacacatacagaatgtgaggtcccattctagccaatggaaaccaggcgcaacagtagggtggacacgtcaggttataaataaccctgtctcctttgttcagtgtactctcatggcaaaactactggcgagtgtaccctttctgcaaaaagtaaaaattgccttgctgagaaaattaaattgatgttcaagtgctatttctttatggcaccagggaacaagcatttcaaacaggggctttgggggggttattttatttattttttgtcagaacatattattaatttgtttatgcaacaaatatttactgagcacctactctgggccagccactgttccaggtcttggggatacagaattgaacagacagaacaaaaatccctgccctggtagagtttgcattctatgaagacattaaatcaatcatgacaaaaattattcattcccaatgtgtagctgtgaccatgaaatagcacagggtgttagctcaggacagaaaaaaaatccagcctgatcaccccacaggaacagctttaattgaggcttcctggaaggggagtcacctaggagaaggggagggtgatatcatttggatgtcccacccaaatcgcatgctgaaatgtaaaccccagtgttggaggtgggacctggtgaggtgtctgggtcatgggggcttggttctgtcctctcgatagtgaattgtcatgagatctggtcatttaaaagtgagtggtaccccctctccaccctgccgcccacacacactctctctcgctcctactttcgccatgtaatgtgcctgctcccacttcaccttctgctgtgagtaaaagttctctgaggcctccctagaagctgagcagatgccagcaccatctacagcctacaaaactgtgaaccaattaaacttttttcttttatataaattatccagcctccggtgtttatttatagcaacccaagaaccacctaacacagagggtaagaagaagggctccaggcagagattctggagatggaagacaggatcatttggaactgaaagaagaatggcgtgagagaacctaggaagaaagctgaggggtggacaaggctcagccacacacagcctggtaactgaggattcgcgtctttgtcctcaaaacagcagggagccacagaagtgttttaagcatgggagggacactatgaggtgtgtgtttataaaacatggtgctggtggctgggcagagaaaaatggcaggagggacagagtaaaagcagaaagacaaaggcagagctagggcaggagctggggaggtggtggtggtttcgaatacagtaaaggctgtgaagatggagagaaaaaaatggagggaaatttgagaagtaggcctcactggtaaggaaactcactgtctttattttgctgcggttgctgtaacagagtaccatggactgggtggcttaaactgcagaaattcaccatttcacagttctggaagttagaagtccaaaatcaaggtgtcaggcaggatcggttccttcttagggccagcagggaaggagctgtcccaggcctccttcattggcttggaggtagacattttcctattcttttggcgtcccctctggctgcatgtctatctgtctccaaatttcacctgtttataagaataccagtcatcttggattgaagcccaccttcattttaactggaaggaccttatctccaaataaggtcacattattagggacggggaattaggacttcaacatatgaatttggggaggacaatttaatccataatgtggggtcctaataagtaaacaacaatacagaaggggctgcaggtttcaggggaacaatcattctgagagacagataatcacagacaacccactgccacaacatcctattccaaatcctcattccgcatgtagcctcagcagcatgaccctacctacacaccttatctgcacgtagcccctctggtagtaccctttaaaacttccctccagcccctgcttcttggcagacagccctttctctgtagtactgcctgttgcacccttgcaacatatctttgtactttctctagcaaatctgcctttatttacctatgactgtcttggtaaattattttactgcctgtgatgccagccccagccggtctcacccgcaacacataacactaagaaaagtcctgccgggtgcagtggctcacgcctgtaatcccagtactttgggaggccaaggagtgtggatcacctgaggtcaggagttcgagaccagcctggccaacgtggtgaaatcccgtctctactaaaatacagaaattatccaggggtggtgatgcacgtctgtagtcccagctactcaggaggctgaggcagaagaatcgcttgaacccgggaggtagagattgcagtgagccgagatcatgccactgtactccagcctaggtgacagagcgagactccatttcaaaaagaaaagaaaaaaagtccaaagggagtgagaagaagattaaatgtcctttcatgggtttagagagaccggttacagcaactctgctggcatccctcttacctgcctagactgtctgtgtgagggtttgcttgtttgcttgtttcagatgatgccttccagagagcaccacccaactcttgagatgcccatcatttccaaagatgaaatctcaggcccaacagacattcctgctggatatcttagcctggggagggacaaaagagcctgaactggccataaagtgtgtgccagcaacacctaagtaggacacccaggaaggccaagaagggaacccagtaaggggcatattttccttctttttccaaaaacgtccggatatttatcgcagtattactgtctcctcccagaggtccccacatctgattcatagtcacttgactcgggggtgcttgttaaaaggcagcttcccaggccccacccttggggattccagggtgagacccccagactgctatcttcctcccatgccccagctggctgtggtctccagtggggtttggaagctgccgctccaccagcccttcttccacggcctaaagatagacatgcgctcagggctgtgcggagcccggaggttttgatctgtggggaactggcacaattcctggcccttgtttgtccctcgaagttgtctcaaggcagaatctaatttccatttctattcctgcctctcaactctgactacttcagcaaatgcctttcaattgccccatttttttttcttaaagaaccacctctaacttcaatttatatatatatacataaatgtatacatatgctatttcccctgttccagaagctttgtgctttctacctcagggaggggtttagaaaaagattttatttgtcctacctttgattcctttaagtcaacagagacagccttaacatgactttttttagagaatggatctcactgtcgcccaggctgaagtacagtggggccgatcatggcttactgcagcctcgacctcctgagctcaagggatcctcccacctcagcctcccaagtagctgagactactggtgtgcatcatgcccagctaatatttttatttttatagagacaggtgtctccctatgttgcccaggctgttctcaaattcctggcctcaaacaatcctcctgcctcagcctcccaaagtgctgggatgacaggcatgagccactgcttggccttacatgatattttttttttaatttttttagtatttattgatcattcttgggtgtttctcggagagggggatttggcagggtcataggacaatagtggagagaaggtcagcagataaacatgtgaacaaaggtctctggttttcctaggcagaggaccctgcggccttccgcagtgtttgtgtccctgggtacttgagattagggagtggtgatgactcttaacgagcatgctgccttcaagcaactgtttaacaaagcacatcttgcaccgcccttaatccatttaaccctgagttgacacagcacatgtttcagagagcacggggttgggggtaaggttagagattaacagcatcccaaggcagaagaatttttcttagtacagaacaaaatggagtctcctatgtctatttctttctacacagacacagtaacaatctgatctctctttcttttccccacatttcccccttttctattcgacaaaactgccatcatcatcatggccccttctcaatgagctgttgggtacacctcccagacggggtgacggccaggcagagaggctcctcacttcccagacttggcggccgggcagaggcgttcctcagttcccagacggggttgcggctgggtagagacgctcctcacatcccagacgggctgccgggcagaggcgctccccacatcccagacgatgggcgggccaggcagagacgctcctcacttcctagacgggatgaccgctggaaagaggcgctcctcacttcccagactgggtggcggctgggcagaggctgcaatctcagcactttgggacaccaaggcaggcggctgggaggtggaggttgtagcgagccgagatcacgccactgcactccagcctgggcaacactgagcactgagtgaacgagactccgtctgcaatctgggcacctcgggaggccgaggcgggcagatcactcgaggtcaggagctggagaccagcccagccaacacggcgaaaccccgtctccaccaaaaaatacaaaaaccagtcaggcgtggcggcgcgcgcctgcaatgccaggcactcagcaggctgaggcaggagaatcaggcagggaggttgcagtgagccgagatcgcggcagtacagtccagcctcggcaacagagggagaccgtggaaagtgggagacagagacgagggagggaggagaccgtggaaagcaggagagggagcgggagagggagagggcttacatgatattttgatcagacttttttttttttttttttgagactgagtttcactcttgttgcccaggctggagtgcagtggtgtgatctcggctcaccaccaactctgcctcctgggttcaagggattctcctgcctcagcctctcgagtagctgggattacaggcatgtgccaccacgcccagctaattgtgtatttttagtagagacgggatttctccatgttggtcaggttggtctcgaactcccaaccttaggtgatccgcctgccttggccccgtaaagtgctgggattataggcatgagccaccacgcccggccaatcagacccgtttaatgctggtggagatggcctctggtgggccacacttaagcaccactgtggaatggcccctgactgatgctgctagttccttgcctgcagtccctcagcacctacctccacacactgaaggtcacttagggcaaacattgcaactctccacctgtggctacaggtgcatggccagtgcacaggaagatagatcaggaattgatggatagatgccccaacttccttatctataaattgggatacctctaaggcaggttctatactggatcccagttccccaaatgaattgagctctagtcgcccacagtggtaacctgctggataacacgccattttctggcttccttcccttctctgtctcacttcccctactcctggaccagtgtttcttgggatgacatgccaaggatattacttgtgctcaaatccttatttcaggatctccttctaagagaactcaaagcaagataagcactattctaaactgttcttcctgtgctagaccacagcttactcaacaactcaagtccaagactgtactatattttgaattttactagaggatatttagggtgcagcaccgtagacgttagaaggtttgccttttttttttttcttttttttttttttttgacacggagtctccttctgtcacccgggcttggagtgcagtggcgcgatctgggctcactgcaagctccgcctcccgggttcatgccattctcctgcctcagcctcctgagtagctgggactacaggtacctaccactatgcctagctaattttttgtatttttagtacagacggcatttcaccatgttagccaggatggcctcgatctcctgacctcatgatctgcccacctcggcctcccaatagaaggcctttttgagcaatgttaaatccaatcccgtaattcaaactgagtgttcctctgagactttggaccaaattgggcttgaagctccaataaattgtcagcatctgcaaacccatttcggccagcataagccataagagtttttggaggtggattggaaaatggtgaagctactttggaaaacagtctggtagttcctccaagtgttaaatatggggttaacatatgacccagcaattctcctcctaggtctgtacctaaaagaactgaaaatacatggctccacaaaaacatatacacaaatattcacagcagcagtattccaactagccaaaaagtgggcataacccaaacgtccgtgaacatcaattcaactaataaataaaacgtggcatacccacacaatggactattattcacccatgaataaatgaataaagtgaatgaaatactaatgcatgttacaaaatggactaagcgtgaaaacattatgcttggtgaaagaagccagtcacaaaaggccacatattatacgatttcatttctataaaagttcagaataggcagattcacagaggtagaaagtaaattagtggtttctggggatgtatgaagagtgactgctaatggatatgggatttcctggggggtgatgaaaatgttctcaaattaaacagcagtgatggttgtgcaactctgactattctaaaaaccacagaattgtattctcttacaagatgaatttcattttatgtgaactatatctcaataaagctgttatttgaaagagaaagatgggggaggggagttgagattttttgtgtttctggtctcctgtgaaaccacacctctcaatttatatattcatttatttattagaggcaagctcttgttctatcacccaggatggagtgcagtgtcaaaatcatagcccactgcagcctcaaactcctgggctcaagggatcctcccgcctcagcctcctgagtagccaagactacaggcatgcacaacctcacctggctaatatttttaatttcttgtagagaccagggtctccctgttatccaggctggtcttgaactcctgggctcaagtgatcctcccgccttggcatcccaaactgctgggattacagatgtgagccaccatacacagcctcacacctctaagttttttacaattttctatagctcttcaaagccctgtcacaacctcagtgggcctaaaagtctggctgtgggtcttggtggcagcaaagctgaattccaagcagaggtggggtatggccggaacttacacccatatctccagccatgtgtcatatgcacaggcagaagccaggcagggccagggcttggataggatcagactaagactcaatggagccagggtggggaaaaagccagggccacacccagaacttcttcattttccagaaaggcagtaagcatagccatctgagaaggcccttagaagcctagaatgatgagtccatcaaatccaggccaaattgctggagggttgctcatggaatccccacaacagccctgctccatggagattttttttctgagacggagtttcgctctgtcgcccgggctggagtgcagtggcacaatctcggctcactgtaacctctgccttcccgtttcaagcatttctcctgcctcagcctcctgagtagctgggattacaggcacccgccaccacacctggctaatttttgtgtttttagtagggacagggtttcaccatgttggccaggctggtctccagctcctgacctcctgatctgcccaccttcgccccctaaagtgttgggatcacaggcatgagccaccacgccctgccatggtgatcttaaagtaagagtatgcagttaactataaactagaaataaaacctatgctatagagctgctgtaagaagtaatgagttgatttacatcaggtgcctggcatacagtaggaagcctaaatgttggctccattcttcagtacgaaggctgacagtctgaagttaagtgcctgctcctcaatgtagatcaaaagactgagagacacaatgagttgtggcacacataattacaagatggagagaggagggccttaaagaacatccaattctacacagtaaataacaacttgagaaacaggctcagagagaggcagcaacttgcccatggtcattcagcaagatggcttggtcattcaaagaaagagcaattccatattcccaagttttttccctaaatgccaaagagcaaaacaactcgtcctccaataatctttggcaactctttataaagatacttctctggcataaaagctaaattgcctaaatatggctaactcttggataatgctggttaattctggctaatgtttaattctctaaagcatcttttcccatcaataaacttttttgtgggaactctcatttgccttgtgtttcttatggaaatgtgatttgtacatacatcctccttgcataaatatttagctcatcattgtgcagcacaaattccctgcaaattaggtggaaatcagcctcagctgacgaaagcatctatattcatccgggggaaaaatcattattatttagaacttattaagccctgacagtaagtactggatggacctgggaacttcaataaacattgaacgcaaatgtatgccaaatgcttgggcacagatttctcttgtaatttctacctgccaagaggcaggaaaaggtagagaaatgaaaatgggctgaaacttggctctgctcattacaaactgtttcaacaagagcaaatcactgaaaccctcttcatctataaaatgggtctaaccaaacgtatctcatagggtttgttattataaagattaaataagatcatatgtgtaaagtacctagcaagaagcccagaacacactagatgctcaataaatgtttgactctaaccaacaaatgaatctgaagtaggtgaaatgtagaaatgttagctcaccagttggttacagttgcatcctaccccctgcactgtgaacataatttgctccaattgcaactaggttttatttgaaggttgcagttaatgctgccaattttacataaaattaagtagaaaagcagttttgaaatagcttggaatagaaatttacatgttatataaattgcattattaaactttgcagccaacactcacaatgtcctgcccataccccttagacattttattgtgctccagggaattccacctgtcagcatctatatctctatgcctgagggctcttgttccaggaaccatgggaatctgccctgccagtgcatgataggtcagatgtgccaggtaaagaacactctcaggagccaccttcaaccaatgactaagggagccggtatataaatacccagttccctcacctcttgtgtgggatcagtctgaggcctaagtcttgcaccatttcctcaagttccctcacaggattaaaccatcatgattgatggctcaatgacacactttgctggcatcttgtcttccttgtttcacttcccaatctgtgtgaccttgaagggtttcagagtatactatcccaaaatatgccactctggcataaggattattttgagctgaaggcaattgagaataaggagacaccggacaagctctctacccttccctatctgcctgaaagcagaacttaaattcctcttgtgaaggtgtttccccgactcacataccaggaaagagataacaaccttatcaccagaaatgagatgatgaagccatctacacaaagaaaccttactaaccagcccttttctaccactaattttcccatatatttaccttcccacaatttgctgcccctagcagttcaaagtcattttcttttttcttgtcacttctctacaaaattattgttctttgttaagatggtatataaacccaagctctaaccattgctttgagttactcatcactaagttctctcatgtatatgtacactgcatgtgttaataaacttggttcttttcctgttaatctgtcttctgtcagtctaatttgcaggcccccagccagaagggtacagggaaaaaaaaaaaaaaaacttttcctcccctacaacctctacttcccaaataaatatctttcacttggattcttgtcttagcatttgggagaacacaaattaagcatgtgctgggttcagagctccagcctcatatacccaacagcacactggacactccactggctctttaattcaatatgaaaaagtgatctccccataggccacacacacacctgctccaaccccagagacagatccaccacccactcattcttccaagccagaaacctggatctcaccctcgctttttccttttctctcccctgctccccaccatttccagccatttatcaagtcctgccagtttgaactccataatctctcctggaatcagtccctttctccattcctctaaatactgaggcaaacaatctctggcttccattgcagtagcctcctccctgttgtcccagatccaccatggatcttttctccatgccacagtccagaaggattgttctttttaactgcaaatactgaatagcaaaaacaacgcttaatgaaagcttactttttgttgggccctgctctgatcctgttactccccagcttaaaatcttccatgggcttcctatagtgcttagaataaaacctccaactccttgcttgagcctacaagcccctgtgatctgatgccccttttctccataacttcttttcttaccatttccggtgctgaatctaatccgaagaggtccttttttgaaacaattaggtgggtcagttttttacttttccatggagaatcgacttttttttttctttttttgagaccagtctcactctgacacccagattggagtgcagtggtgtgatctcggctcactgcaacccctgcctcccagactcaagtgatcctcccacctcagcctctcaagtagctgagacgacagacacatgccaccatgcccagctaatttttttgcatttttgctaaagaaaggtttcaccatgttgcccaggctggtcttgaactcgtaagctcaagcaaaccacccatcttggtctcccaaagtgctgggattacaagtgtgagccaccacacccagcctgagaactgacttttgaatgtccatcaataccaactcccgatccctaccctcactcctacccatcatcttcccaggccctgctctatccatagcctccactttcaggaacaagcctttcctccctgagatcctcgctgaggcacctgggaagacatgagattatcctctttaacaatccataggttctttagagccagaacccgcccctaccttctgcaaggcctggcacagggcccaacacacagtaggtgcttaatgaatgtttgttgagttaattaaggaagctgtccagtcttaatcacaaacattcgggatgcttccttcaaaccaccttcccccaagggagcctatagttgattggacaattactccagtgctggaacaaatcactctcaggcgttcgatgaaactattcaatgaatgctgctgacaaaagagctgattgcgctgctttgaccctgaaagtaattacatgtgccagcatccatctgcctgtggggttgcccggaagggggtcctcacctcgtttcagctccatcttctaaataaactcaaaagagcatacattgtcatttcccccaggatcgttatggcttgttagaaatcaaacagagggcaggtaagtggtgtataatctgcatgaacaatctccccaggctccaaaaacctcccttaatcatctctatcacaaaaccaaaaccaaagagccccccactccttgagaacgcagcagggagcctccatgccccactaagggcccaggatcaagtgactgtttgctctgcggtcagtcccacacatcagccatctctggcctgttaattaccttctttcacccatcctgagaagccagagtcatccttgatgcttctatctcttcatctatccattcatttattcattctttccataagcatttattgaatacctgttagaaggcagcagacactgctgtgtttacactaatgaacaaggcagcataatccctgacctcatggagctcatagtctagagaggaaaatgaatattaaccaaacaaagacacaaatattgaagacaaatttacattaaacacacctgttatttgctgaatctttgccaggtcctgcaggggaggaatgtagcatgggaggggaggtcattgaccaagatggttttaacttcccctcagtttcactaaactttaaacaggtttctttctgactttgaggtcctggcaaacattttcttagagcatttacttttttctttttttctgagacacagtctcactcggttgcccaggctggagtgcagtgtcgcgatctcagctcactgcaacctctgcctcctgggttcaagcgattctcccgcctcagcctcccaagtagctgggatcacaggtgcacaccaccatgctcagctaagttttgtattttttagtaaagcttgggtttcaccatgttggccaaggtgatctcaaactcctgacctcaggtgatccgcccgcctctgcctcccaaacggctgagattgcaggtgccattttctctaaaacatttaccttaaaagatttgcagtctacagtttttttgttttgtttttgataaaaattgccccttttgagatgtaaatctcccagtttcttgccaatttttacaacctaggaatgtctttctcaaggatctggcagttatccctttgaaatgcaatcatcaagaaagatagcaccacaatctctcagtctctgcaggagggaaggtgcctaactttggtaagcaccaacattagcaaacgcaaatgtcctccaggactttcccactagctcaccccagtgcttaaaaaccctctttgctttggcctggcgcagtggctcacgcctgtaatcccagcactttgaggggccgaggtggggtggatcacaaggtcaggagatcgatatcatcctggctaacacggtgaaaccccgtctctactaaaaatacaaaaaattagccgggcatggtggcgggtggctgtagtcccagctactcaggaggctgaggcaggagaatggcgtgaacccaggaggcagagcttgcagtgagccaagattgcgccactgcactccagcctgggtgacagagcaagactccatctcaaaaaacacaacaaaaatcaaaacaaaacaaaaaaacaccatcctgggttttgtttcggggaggtaagttcaatctccctcccctactgcaattgtcttaaatagtctttctcgcctgattaactctgtccagtacagcaatgaataaaacacggatcctgccccaaaagaatgtaaggtctgatcaagacaaatgaaaactttccgaattgtagtaaatgctgtaatcccagcactttgggggatcaaggcgggcagatcacttgaggtcaggagtttgaaaccagcctggccaacatggtgaaaccctgtcactactaaaaatacaaaaattagctgggtgtggtgacacgtgcctgtaatctcagctactctggaggctgaggcaggagaattgctagaactcgggaggtggaggttgcagtgagtcaagatcgcgtcactgcattccagcctggggtgacagagcaagagtccatctaaaaaaaagaaaaaaagaaaaagaaaactagaggaagctatgagacagtgtaacagaggaaacttaatttagatgggaagggactctaggaaggcctctctgagaagaggtatttgagctgggacaagcatcccaggcagagaggctaacacacataaaggcatttagatcaaacattcagctgcagaaatagaggtatttgagctgggacaagcatcccaggcagggaggctagcacacataaaggtgtttagatcaaacattcagctgcagaaatgttaggtccctgccccaaaccaagtcttactatatttgtacatgcgactcttcttctactgtgtgctccctcagctcaataaccttccaggaatcccaggtggctcctgaacaaagcccattgctcctaacttccttaacctgatggtcaagattgtatttaatctgactgcttcttcacctctccagccatatagagacaacctcccaatgaaacacaagccttctgggtgtgacagacgaaggggcttcttgcagaggcaaatggaagacaacctagaaggtacaggtgcaaagtgctcacatgattgagagtctatttttatgcttgaagtacagataggagggaaaacagttctctcctattggacgaaaaaatccagttatttttccttattctgtgacacaaggaccttaagtaacctgaagtaaccaaaagatcaggctttggtgagtttatttcccaagtaaaagacatgcctggtgcttgacagtctcctgggacctcactagccctggagccccttccgtccccaacacacccattcccctctcccactctggaccaatccctacagttcccccagctcctccccatgcttctgatagggaaagagaatcagggtcacccttatgttaagaatagaagtaaaatcttgatggtattacatttggacaccccacaatgcctgattcctggctctctgcaggattccttagggagccttcatcatagaggtgtcatcaagcaggaaacaccatgttcttctgtgatgagctgggcccaagcctggtccacacagtacagaactcaaaagacccgaggcaggagcacagagcttgaactcaccgctgttatgcgttctacctccattaaagctccagtagcaatgcagcagcagggagggcatgctggcctgacagcacgtccccaggaaggggagtctacacgtgtgtatgcaactgcacagcccactgtggccttgcccacaggtccctgtgatccaatcactgtcctggcctttgaacaatcagatggtcagagggattggagcacctgaaggaagtgagagcacctccccatcacctctgatcactcttttccaactctctctgcctgctagccctgagcgcaggattgtctgtttgaccttctcccaagtgtctgggtcatgctctccatcccaaagctaaagcccttgtctccttcaccctaatcaccctcctttcttcaccccttggcccatggcctacgtagggcttcgagctctgggcggtggttcacacactctgctcctaccctctctgggtcaggagcttcctaaagccaggcctgcagcccagcaatccccttgtccttgactcgtgcatctgggatgagctctatctgcatcccgtcaagagctctatctgcatcccgtcaagagcaaagagttactgaggagatagaagcaggactttttttcctttaactcaattaagccacatgctgactgtgatactttctccactatctaaggcagcaggtgcctttgcaattacttcccctctgctgagcctgcatgtcgcctggggtctccaggagatagagatgaagctatggaatcacaagggcaatgtgatgggcaaagaggccagggagaccagaggactggccacagagaaagatcagccaggaatgcaacaatgcaggtggccccaggcaaagctacatctggaagccagctgacatgtgactttcagctgctttcaagggccttagaagcaagggagcatttttaaatttgggttcccccaaaagcagatccggagacaaggactgggtgcaggtagtctatttggaaagtgagcccaggaagcagtgaaggagaactgatagggagtgaagaaagtcgacaaagcctgcagctacgagagggtctgttgctgtgggctgatggggctcaatcccacttggaactccatggaagactgtgtggagcatacatgagaagcgttcccaaggggcaaaaaagccaagtgtttactcaccatacagggttgaatggtggcccccaaagagacatgtccatgtcctaacccctagaacctgtggatgtgcccttatttggaaaaagggtctttgtgagtaaacttaaagatcttgagatgagatcaacctggattacccagctgagccgtaaatccaatgacaagtgtccttttaagagatacatacagggtcaggcacagtggctcacgcctgtcatcccaacactttgggaggccaacaggggtggattacttgaggtcaggagttcgagaccagcctggccaacatgatgaaacccccatctccatctctactaaaaatacaaaaattagccagcgtggtggcacacacctgtaatcccagctactcaggtggctgaggcaggagaatcttttgaacgcaggaggcagaggctgcagtgagccaagatcatgccattgcactcctgcctgggcaacagagtgagactccgtctcaaaaaataataaataaataaataaataaataaataaataaataaataaagggagagagagacatagaaaaggaaaaggccatgtgaaattagaggtaaagagtgcagtgatgcaaccacaagccaaagaatgccaagagccagcaggagctggaagaggcatggaaggattctccttagagccttccaggaatcacatgaccctaccaacaccttgatttcagccttttggccttgagaactgagaaaacaaatttttaagccacaaagtttgtgataatttgttgcagcagccacaggcctggtgttatcgatgggataacacccatcgatacccaaaccttcctggttaagaattactcctggggttggccgggcacagtggctcacgcctgtaatcccagcactgtgggaggccgaggcaggcagatcatgaggtcaagagatcgagcccatctggccaacatggtgaaaccccatctctactaaaaatacaaaaattagctgggcgtggtggcgcaggtacttgggaggctgaggcaggagaatcacttgaacccgggaggcagaggttgcagtgagctgagacgcaccactgcactccagcctgatgacagagtgagactcagtcttaaaaaaaaaaaaaattactcctggggtcgtctgtgccactgaaagctgaggccactactgcagccagagaaagacctccggcagagagacacctgtgcctacagtatgaaaccaccagcgtgaccaggaactgcccacagaaactgcagggaacctctgggaagaagaggctgaaggatgtggaagggtgggggagtactgacagcgcctgccacagtttggctggaattggatcagggccgcttctggtccacgtgactgtgttttctaaggggacctccatcaggaatcaagctcttcctcaggatcataccgtcacgtagggaaaaaaatttacattaccatgttcccactatgtgcccacacacacatcttctcccatccatcctttaaacagccctgtgagatacgaaggatatgacaggcagaataataacccccaaagatgcccatgtcctaatccccagaacctgtaaatgagctaccttgtatggcaaaggggactttgtagatgtgattaagttaaggatcttgagatgggggattatcctggattgcccagatgggcccagtgtaacatagggtccttataagagaaagggggaggtgggagggtaggggatccaaatcagagatatttgaagatgctgtcctgcaggctctggagatagggaaaggggctatgagccaaggaatgcagatggcctccagaagatgaaaatgcaagagaaagcattctccccctagagtctccagaaggaatgcagccctgaagacacctcgatttttgcccagggagacccatttcagacttctcacctccagaactgtcatattacacatttgcatgttttaagccactgagtttgtcgtcatttgttacagcagcaataggaaactaatacattttacaagggccttagaagcaaggggttgtgttttaatttggcttccccaaaaagcagattgagagataaggacttgggtgcaggcagtctatttgggaggtgatcccagaaagcacagggaaggagaagtgacggggagtgacaagagtcaacaaagcctacagtaatgagagggtctgttgctgtgggccactggggctcaatcccacttggaactctctggaagactgtgtggggcagattgagtttagtctacgagctgcgaggaatgggatgggagctattagcagaagcttctctggatttaagtttctttcccatggtacaggatagtgtttcttagagagtaattgattctttctttttcctctttccttttgctttcttttttgcactcttgctttctccatgatctcctccaaccccaattcaagctgccaagcctcttgagctcattgcctgagagaagaggacagacatgacctggggggacaacagaaacacagccgcctacctggtttaccatcaccacagggctttgcccttggggaatgcaaaaacctgcaagaggaatatggccatcctggccttccccaccccaccagccaggactggtgaattttcccccaggactgagaaggagaactgaagatctcccgtgagaaagggtgtgcaccccagggaagcagcaagagcccagaaaggagagactgaatgaggagaccaggcaggcggggctaaagaactgacccggcttggcccttcacataggatgctgtgtttaaggctgaacaagccagagtttggagaacacgccgtgcgccatcatgactgttgcccgagctgaggccagacccaaccccgaggaagggagaacagcttcccatgaagggcatggctgctgccaccataatcccagggcaggaaataaagggatcttggactaggcaatcaaaggacttcctctccctctaaggccaaggaggaaatgtggctgggactccaagctctgtggatgcctggaggtgccagcagctggggatcagctggccccacctgcagagcccagccagtggctccccctgcatctccaaggttgggtctatgggctccaagaacaggtgtttctcagggtaacctcagcccctacaacttcaaccaagagagtgaaggggagcagccctggaggccaatgaggagggggattagtggtcactgatgacaaagacatccctgtccccagagccagccccttgtgagcagaagaatggctgccggggcaaaaggacctgctatgccctccccatacacatatcatggcagctggggagccctctgaataacagggggcgctttagagtggcttcattaccaacaagaggcccagaaggggctagagccacacgatttcatggtcggccgcgtgcgtgatcgtgtctcacagcactggagaggcttccagattacacttgtaataaaacattttatggggaagaaacaaatgggagtaaatttgaatgcagaaataagcaatgttttagagttttgtatcattagcagaattagataattaaaaacataaaccagaaataataagccctccctctctgggacaccctgtgtattcaaggagatgctgtgcgtacaggacccgtcagagccagcagagcagacagtgaatagatctacacaagaaaggatcattcttaacatccctccccaacactacacagcaagattatcttctgtaataattatggaataatcagtaataatcattacgttcctgattcattctttagtcttaaaacaattagcaattttagaagagaaatttcaatgttacatatattattcagattcaggaaaatatttactggaggaactaaaatttgcactcaccaaacaaaaaaaatattccagctcaatggccggacgcagtggctcacacttgtaaccccagcactctgggaggctgaggcagccgatcacctgaggtcaggagttcgagaccatcctggccaacatggcgaaaccccacctctactaaaaaatacaaaaattatctgggcaagataatcccagcttgtaatcccagctattcatgaggctgaggctgcagaatcacttgaacctgggaggcagaggttgcagtgagccaagatcacaccactgcactccagcctgggtgacagagtgagactctgtctcaaaaaaataaaaataaaataaaacattctagcttatggttcaggctccatctcatggttcgaaattttcagctccagtaaaaactccaagtggtcatatagactttaattaaagaattaaaataactcacattagattttgtcatcatttaattagtggactattatggctgatattggatcaactgtttatttttattttatttttttgagacaaggtctcactctctgttgcccaggctggagtgcagtggcgcaatctccagaagctaatgtaacatatgtggaagcattttgtaaactgtaagtgcagtacaaatattactagagttaacagtaataactgtgcagatgcaatgcatttggtcacaataatggaccagaaaaatcagagagaaaaaggaaggtagttgtttatgcgggtgttaacaacctggacaaaatgccacagccaaattcaacagcaccaatattatgttaccaaaatggagcctgtgaagacagccaaatggggtgaccacacctcccagtgccaggcagccagctgccagagacacatttcagctcagtcatgctgaggcaactgtgccattgcagagaaatggccatgatattcaccagcccctggaaacccagcagcccccaaacacttccccagagctagcttataccaggttgttggcagaggacagaaatgagagagacaagcgaccacatggctgcccaaggaggtgcctgctgggacacaggcactaaatacgaggtgttctggaaaatccacgaccccctactccattgagggagacaaataaagagcataaagctgctctttgcaaaagcatatttagtgaacacatagaatttaggctagatgtttctatttttttctcttgttttctttcatttacaaaagaaacacatggcccctaaagccactcttctctgcctactcatgagtaatgggtagagggagagttatttagctggaatgaggtacaaagagaggctgacacaacgagaacaagagttagaggccacagactcctcacagctgacctggggagcatcctgacaaccctggaagggacccctcctggaaggtcacacaagccacccttccatccagcactagagtggccttgtagcctctgctttgcatgcctcccaggacaggacagtcactgctgctggaaacagctgtggacatctctgatggtgaaaaaggtggactgttggccaagcccttcacactgcccatgtctccatattcaagccacagctgtggctgggaatgccttgcagaagcaccatgcaacccatcctccccaaatgaaattgagcccccgatgtggtccctgcccttgtttacagcatgcacagctgtctgtgttttagcctattttattactcttcctcacccccacttaactgtgagctctttgaagacacaaacagttttctccttgatgcctgatcaaaatagatacttcaaaatccttttgttaaaaacgcaattctaggccgggtgcggtggctcatacctgtaatcccagcaccttgggaggccgaggtgggtggatcacaaggtcaggagatcgagaccatcctggctaacacggtaaaaccccatctctactaaaaatacaaaaaattagccgggcgtggtggcgggcgcctgtagtcccagctactcaggaggctgaggcaggagaatggcccgaacccgggaggcggagcttgcagtgagccaagatcgcaccactgcactccaccttgggcgacagagcgagacttagtcaaaaaaaaaaaacaaaaaaaaaaaaacgcaattctagccgggcgcggtggctcatgcctgtaatcccagcactttgggaggccgaggtggacggatcacaaggtcaggagatcgatatcatcctggctaacatggtgaaatcctgtctgtactaaaaatacaaaaaattagccaggcgtggtggcgggtgcctgtagtcccagctactcgggaggctgaggcaggagaatggcgtgaacccgggaggtggagttttcagtgagccgagattgcgccgttgcactccagcctgggcaacacagtgagactccatctcaaaaaaaaaaaaaacgcaattctataacatcattacccaagctccctctgccctccagcttctgggctaggcacaacctcacagagcatcagccacctggcccctctcatgccctcaccccaactgcaattcccagcttcactccacccctagagaaactaagctcaaagcaatggctttaggatctcagggcagctttctaatccaatcctctgttgctgtggttctcaaacttgatgtatcaggatactctgaaagacttaagacacagatttttggacccaccctccaagtttctaattcagtgggtctgaggtaggtcttaagagtttgcacttctaatacattcgctggcgatgctaatgttgctggtccagggctcatattttgagaaccacggtaccacagtgctacattgaggtcagtccttgaaagacattcccagccacaggaacagcttgagtggaggcagaggcagcatagaggcttgggtgacatctgccttttctcaccattcaagatgtctgcaagctgctttaagcagcattgagcacccaaggcacacgagcagaggctaccagaccatatcacacacgcacagcttctctgctcacggtttatctaacctctgtttatacatctctgtcttagtccatcttttgtgagcgttgctataaagaaatacctgaggctgggtaatgcataaagaaataaagttagtttggctcacagttctgcaggctgtacaagaagcatggcgccaacaatctgcttggcttctggtgagggcttcgggctgcgtccactcgtggtagaaggcaaaggagatctggtgtgtgcagagaatacatggccagagagagggagcaagggagaaggtgccgggctcttttcaacagccagctctcattggaactaatagagcaagaacacactcaccacagcccccagggaaatcattagtctatccatgagggatctgcccccatgacctgaacacctcccattaggccccacctccaatactgggggtcaaattacaacatggaacttagaaggaacaaatatccaaaccatagcaaccttcttcaacaagatattcacaacttgtccagttagactggccaatcttcagttatttcttatattgagtgactgctcacctcctgcctagggttgccagataaaacacaagatgcctagttaaatttgaatctcacatcaataatggataattttttggtatgtctcatgcaaatatggttattttcatttgctaaacctggcaacccaacattcctacccatgaagtctccaggtgcttgagccaagttcctgccaatactgaagcagccaggtgagcctcaagttcagaggaagctaggtcttctgcatcacagaaccaatttagccaaagccaagagcaaaaagagtcagtctcaggaaacacactttgttagagctgcactaagctcaggtcttacagctagtccagggctggggctgtggcaagaaaatgacttccacttgggcttcccaggtgtgggggtccttgccttgaagcagatttgcgctggaatcctatcatatggtcaatacctggtcatccatccatacccacaccataggggaatgttagagccagggctaaaacccacttcttctgattcctgtgctaacaagttttctctaatgcaagaatcatttcctaagaggtaaccccaggatcctagtataggtgctaagtggtggaggaatctttctgcacaaaccttgtcattgcaaactccaaactctacgggtcagaagagtcctgctcacttcacgttgtaccccttagatgccatctggcccagccacctcataggagaccagagaggtgaaagggcttgcccaatctccaatccaagttgacagcagagctggacaaaaatctacatctactgacagctcagaccttgtccaccctgccaggatctcttccaattaaaaggaactactgttaacttaaaaccacagagatgtaccatttttctcccacggaactagcaacaatgaaaaattctgacaatatcaagtgttggagaagaggtggagaaaactgtattctcctctactgctggtgggaatggaaatcacaagggcaaacttgcagagcattcagcaatacctagtaaaatgggaagtgcatatatacaatgtaacaattccactccagcttcaggcccccacagcaactctcccacatgagcccagtgagatctagggcaaggatgctgacggcagcattatttgttatggtgaaaaattagaaacaaactacgcaacaagacagaaatgagaaacaaaatgtggtctattcacatgatagaacaccttgcatagttactaggttggtgggaaaggaattgccatttttgccattgaaagtaatgccattgaaagtaatggcaaaaatggcaattccttttgcaccaacctaatagaaagaatggattagagctaaatgtatcactaacaacagtgggtgaaagtgtccttatgtgaaaaaccaagctgcaaagagaccagagcaaatttgtgtaaatgtggaaaagcacccccacaaacaataccatacatttattattcataatacattacatatgtatacacaaaatacaaaagcttcccaaaaaaaagtatttttaaaaggcacagttattcatgaaagtcatgatagtggttggctctggaaagggacaaagattaaaccttaagggtgcccctcaaggggtgcttcaatgtcttctgtaatgttttatctcttttattaaaaatatacttgaagaaaatataacaaaaggttcatagttatcatcccagtggtggggatgcaaatttgttacttttgtatttttcttttaacttctcaaagaaaaataaagcggctattctgaggcactgatctctggggcccccagaacctacatgactaatgaaatgtgtttctcggatttcaataattcatcgcctgagcaggggcgtgggtgtgggaaaagttccatccttaagggagtgcggaagaatgtatccaatcaggctaaaatctcccttcctccatcctgactagaaatgaccttgggtctgactggaaaggtagagggtttaatgcaccggatgcttctccccatctattttagaaaggtggaaaggaactcacctagttcaataattcatcagaacctaagcatgatgggatggagaaccttccagagtcatgggctgtgagtccagcaacaaccctccatgaccactcactggctggtttaaggtgaaggactcatcccgagggtggtaagagacataatcccatcggtgcaagaggcaaaacctaaatgcacgcacaaaccacatgtggatcctgctgaaatgctaatcctgagtgagtaggtctgggagagggaaggcaggcaggggtagggggagtgctgagatgtcacttttctgtcaggatcacagggtggggcgtggtggctcatgcttgtaatcccagcactttgggaggccgaggcggggcatcacttgaggtcaggggtttatgacaccagcctgaccaacatggcgaaaccccatctctactaaaaatacaaaaattagccgggagagatggtgggcactgtaatcccagctactgggaaggctgatgtgagagaatggcttgaacccgggaggcggagcttgcagtgagccaagatcacaccactgcactccagcctgggcaacagagtgagatttcatctcaaaaaaaaaaaaaaaaaaaatcacagatgtccctgatgcttctgctccaaggcccacactttgagtggcaagtctctacactgcccacttcaactgctgctgcttggtctttctgcttcattatcctacaaataaaagcaggagtgttggtggtatttgatggtattagggtcaggagaagcagaaacactaactccaatctcaaaggagacagtaaaaatatttacaacttgatcacagaggtgtgcacaaatgtcaaatctcatcacacttaaaatctctgcattttattgtatgtaaataccaccttagcaaaaaaatatcctgaaacaaaacaaatcaagcctggtccaccaactccctctgaaggctaacctagatcttggcatcttgttacccactgattgggctggagtaaacagtccctagtgacccacccaaccgtagggaagaagaaatggaacccgaatatccaacctgggtgcactccctttatacacatcgcagccacatccgctagtgaacatgcccccactgcagggccttggatttgccccacttagtaaactcttccttctttgcagggggaaacctagaactcaggtgggcagaggggtgcttttcttctcccctcaacagaggtcatcttaaaagggcagagtagctactgagagagaggctgtgtggccaagggaagtgtcaccaaacctgtccttgttaacgtcccttttctgcctttcgagtggctccagcccttcccgtgctgagcttagcctctgtttcccctctgggaatcatcccacctagaatataagttaacttgaatactaggctgtctctcccagcttttttattttcttttttcttttttgagatggggtctcactctgtcacccaggctgacatgcagttgcatgatctcggctcactgcaacctctgcttcccaggttcaagcaattctcacgcctcagcctcccaagaagctgggatataggcgtgcatcaccacacctggctaatttttgtatttttagtagaaatggggtttcaccacattgccccggctggtcccaaacccctgacctgaggtgatctgcccgcctcagcctcccaaattgctgggattagaccacaggttaatttcaatacaaggctgtctctcccagctctgattcctctctggtcccttgttccccagtactctgcaaccagtggcttgcaaaccttattgcgcaacacaatttgctggaaaacctgtcagagctgtgtcccaccccaagtttctgattcaggaggcttgagtggagcctgagaatctgcatttctaacaagttcccaggtgacactgctgctgctggccccagggatgtgctttgaaaaccatcacgttagactttcaacaaacatttgctaaatggatcaaggaacagaactacaagtagagtcagttcagagctcctgtcttggttctggagctcgctcagagatcaactttttaagtaaagctttcttcctaagacacagcatactcattttttaaaacaaggataataatgccaaccccacagggttatagtagggatccagggaagtctttctgagaacctattagaacccacctctgcctagaagccctccaaatccatgaccctcccaaaatccatgagggtttagttccctctggaatcctccagccataaccgctggaagaacacttagatgcaaactaccttctatgggagggtatatacattccccctaaacacatctgtgttcggaccttgtgctacatcccagagcttccgaggtggggaagacagtcattcccaggctggtggggagacagatatgggaagatgcatttgatacacacaatggttatcaatgcaggaacaaagaacagagctcagagtcaccaactctcctgaagaggattccggaaaggcttcctgtaggtggtgatgcatgagccaaggactgaaggatgagcaggagtctgtcaagagcacaagacaccctgcttccttgagtggcccataattgattcagcttgggaacttgactggccctgtcctttcgagctcagatccatgcacacaccacgtgctcaaaaatgtgtcatcatttgtccaggcatggtggctcacacctataatctcagcactttgggaggccgaggtgggtcacttgaggtcaggagtttgagaccagcctggccaacatggcgaaaacccatttctactaaaaatacaaaaattagccaggtatggtggcaggtgcctgtagtcccagctattcaggaggctgaggcaggagaatcacttgaacctgggaggcagaggttgcagtgagccgagatcatgccactgcactccagcctgggtgacagagtgagactccgtctcaggaaaaaaaaaaaaaatcatcattggattaacagacccagcttcttcattgcctcccaggaatgatgccttgtctgacccatggcctgagaaaccaaaaaaaaaaaaaagaccattcaatagattgccctactctgatgaataagacctacgtttgttgagacagcaaagcaggaaatcctttcctatgtgcaaatggtgcagtctcccattaaagcaaaggcaaaggggatgaggctcccctattcacgttgaggctttgcctctagttcagccaccatctggctgccacctgtccctttaggccacctgaaccattggtccacagtcatcagttccctgaagcctgggatcccaaacagctcttacactgtctcagaaaacaaaacaaaacaaaaccaaaaaactcataaacccttctccagcacccagttcctgaagaaagccaggggccagggagacaggagggagagagaatcttttctgcaatcaggcagattgacctgagtttaaatcctagcagtaccttgtataagccacgtgacctgaggccagttattcacccactgggtctcagcttccacatctatgaaatgagcataaaactgctcacttctcaagagtgtggcgatgattaaacgagggcaggtgagtggagagcccggctcccaggtgtacagcccatgggatttggcggcacagagggacccacatgtggagagacgatgttggctggacagcactcctcctggcttccatcccccgcccttgtgcagagcgcgggaagtaggagtgtgaaggcctgagtcctctctgcagttctcttggtgactcagcctcgggcagtaagctcagaaataccacgcgcccagcctgttctggtgacatttcaaatacagagcgtctctcacatcccctcccaggctgtctggtcagtatccattactccagaactggggcgggttgtgcatttctatttccttttcaagggtccttcttcccatctcacccggagatagcacttacagttgatggagtgctgtcctatggctaactttatttaatcctcccagcaaccttgccgaagaggaaactaacactccaaggggccaaaccaactgcacaagatcacccagctggtcagtggcagagccgggatttgaactcagaacttcctggctcacctgcctcgctttttgcactcacccatttaccatgcaaacagggacaaagtgaggccacggttccctcggccttcggacccactctcagcgtcaaacaagagctgggccagacagggggaaatgcactggaactctctggcacctacctgaccaccctcagacaggcagcagtgcagcccagctggtggggccaggtcctcatccacaggcaaggcagaacctccccaaagattctgactgccagctgggcctccatttcggcctctggtcacgggccaatccttcatagggtgtaaccaactggaggcctgtgaagggcacctaggggtgttgccggcttcttcctagcttaataaaaatcctaattgaggaggctcttaagccacttgctcaagcccactcccactctgaattgtcttcaataaatctgtgctttcgttactgtttttccgttgcttttcattgcctcattcgttactttgtgcattgtgttgaattctttgttcaacctgctaagaacctggacaaccctctccggtataaaagcttcctacagagcctccccagacagagcctgacctcagcaccaggggctgcctacagtacagctcctctggtcactgtccctcctcatcccaccaggtgtccctcaggactaattgacagacacacctggctttgcacctcagccagacctctagcatgaaggagatacccgaggggccaagaactgaatctacacactgtccttgcctcccagctttccccagcctgactcaccatccaccaccctttccctcccagacctcttccctgtgttctttggaaacacttttaaattttaattaattttttttttttttgagacggagtctcactctgtcacccaggctggagtgcagtggcgcgacttcagctcactgcaacctctgcctcccaggttcaaacgattctcctgcctcagcctcctgagtagctgggattacagacatgtgccaccacacctggctaatttttgtatttttagtagagagagggtttcaccatgttgctcaggctgaactcccgacctcaggtggtccaccggcctcagcctcccagagtgctgggattacaggcgtgaggcaccacacccggcctggaacccatcttttaagtgaacaaactcacccccatgcttcaccacgtccccagacaaagcatctgtaccttctgtctcaactgaaggtctctgcccccaccaaaaccccacttcttatgcagcctcattcagccggaactactcctctctgcaccccctacctcaaccctctataagcacgtaccttaaggtccaaatttgcagtaagcatcctctttgctcctcactgctaactgggcctggcttccttgcctcaggtgaaactagctcttcaagcctgcgtctcccatcctcatccccatccttcttcctgaagagcctccctctaccccaggctctgtccctttctccaccctaagcaagccctggcagcttctagggccgggattctccaccttgcctctactgacattgtgagccagctcattcctgtggtgggggctgttctgtgccctggaggatgcctagcagcatccctggcctctactcacaagatgccagcaacactacacacacccctcagtcgcgaccaccaaaaatgtctccagaccttgtccaatgtcctacaggggtacaaagtcacccttggtagagagtcactggtctggagcaacatcagcatcctctggaccccaagtccagtgcctttgacctcccgaccccagcgacagtcacttcactcggctccagccctctcccggtgcagccctctgccttctccacgccccaggctgccaggaagcagatgaaagagtgaaaccgcatccatgcagactaggcttcggggccaagctttaacccactccactcggccttcagccagtctgacaccttcatagcactacccccaatctgtaattgaattgtaattttttacgattcaattaccacttccttctgcccgttgtcttttctgcctcctccactgggctataaattccatgagggcaggaactttactgatttcttcatggttttattccttacactagtgaaaggtctggcacagaagacatttatggagagagggaagaaagagagaaaggaaggaagggaaaaaagaaggaaagacagaaagaagggagaaaagaaaaattttttggaggaaagaaaactttgtagaagaggagaggtattaatcagatgaagcaacaacaagagtcaagcataacacgcatgtcacggaataacccgcagctaatgaaagggacagtgtacaagtatctctagagtcactgacatgcaaatattcctaataacactgactatatgctcatctgcatttatacccaaagaaatatctaaaagcatgcccaccaaatggtcaaagatttttgtctctggtaaaagtgagatttcttttttacttccatttcctacaatcagcatgtattacctttccaaacttaaaatagctaccattcacccagcaatcccattactgggtatatacccaaaggaaaataaatcattctaacaaaaagacacatgcactcctatgttcattgctgtattattcacaatagcaaagacaggcaatcaacctagatgtccatcaatgatagactggataaagaaaatgtggtacatatataccatggaatacagccataaaaaagcatgaaatcatgtcctttgcagcaacgtggatgcagttggaggccataatcctaagcaacttaacgcaaaacagaaaaccaaataccacatgttctcacttgtaagtgaaagtgaagcattgagcacacatggacataaatatgggaataataagacactggggactaccagagggaggaaggagtggggcttgggtttaaaaaactacctatcagatactatgctcactacctggatgagaggatctgtaccctaaacctcagcatcatacaatattcccatgtaaccaacctgtacatgtaccccctgcatctaaaagttgaattttttttttctttttgagatggagtctcgctctgtcacctaggctggagtgcagtggctcaatctcagctcactgcaacctccgcctccctggtttcaagcgtttctcctgtatcagccacccgagtagctgggattacaggcacccatcagcacacccagctgatttttgtatttttcgtagagatggggtttcaccatgtcggccaggctggtgtcgaactcctgacctcaagtgatcctcctgcctcaggctcccaaagtgctggaattacaggcgtgagccactgcgcttgacctaaaagttgaaatttttatagttgcactaaaatagtccaggatgtgtttgacggccttctactttgcccatttagcttctgcaagctcttgtttagcagggaacagttatctcttaacacatggttaaatctctaagttgatcataaatctctcattttcaaaaaaaaaaaaaaagtccttctaaacaaaaatttataaatcatgtttttgaagaatatattttaagatgggaaaattctcactataaaaaattaggtgaaaagtgagatacacaaagaaggtgcatattatacataatacatatcacaattaaagcaatattttagattttatgtggaaagtgctaaaaagaccagaaagaaatccagcccatgtcaacaacagcagttctgaggggtggaggggcagggatgagatcactttgccatttctcttctatacttgtctttattttccaaatcttctagagcaggggtccccaacccctgggtgacagactggtaccggtccatggcctgttaggaactggactgcacagcagttgagagagagcattactgcctgagctccgcctcctgtcagctcagtgctggcattagattctcagaggagcgtgaaccctactgtgaactgtgcatgcgagggatctaggttgcaagctcgttaggagaatctaactaatgcctgatgatctaaggtggaacagttccatcctaacttgctcacccctaccccacccatccgtggaaatattgtcttccacaaaactggttcctggtgccaaaaatgttggggacccctggtctaggtcagcaccatccaattttgcagtaagtagccacaagcctcccacagctatagacacttgaaatgttagcaaataggaccaaggacctgaaatttttattttactttatttaaatttaaatagcctcacatgcctagtggctactgtacttaagaataggaaactgaacaacctgctcctgaatgattactataacgaaatgaaggcagaaataaagatgttctttgaaaccaatgagaacaaagacacaacatacaagaatctctgggacacattcaaagcagagtgtagagggaaatttatagcactaaatgcccacaagagaaagcaggaaagatccaaaattgacaccccaacatcacaatgaaaagaactagaaaagcaagagcaaacacattcaaaagctagcagaaggcaagaaataactaaaatcagagcagaactgagggaaatagagacacaaaaaacccttcaaaaaattaatgaatccaggagctggtttttttaaaggatcaacaaaattgatagaccactagcagactaataaagaagaaaagagagaagaatcaaatagatgcaataaaaaatgataaaggggatatcaccaccaatcccacagaaatacaaactaccatcagagaatactacaaacacctctccgcaaataaactagaaaatctagaagaaatggataaattcctcgacacatacactctcccaagactaaaccaggaagaagttgaatctctgaatagaccaataacaggctctgaaattgtggcaataatcaatagcttaccaaccaaaaagagtccaggaccggatggattcacagccgaattctaccagaggtacaaggaggaactggtaccattccttctgaaactattccaaccaacagaaaagaagagaatcctccctaactcattctatgaggccagcatcatcctgataccaaagccgggcacagacacaaccaaaaaagagaattttagaccaatatccttgaggaacattgatgtaaaaatcctcaataaaatactggcaaaccaaatccagcagcacatcaaaaagcttatccaccatgatcaagtgggcttcatccctgggatgcaaggctggttcaatatacgcaaatcaataaatgtaatccagcatataaacagaaccaaagacaaaaaccacatgattatctcaatagatgcagaaaaggcctttgacaaaattcaacaacccttcatgctaaaaactttcaataagttagatattgatgggacatatctcaaaataataagagctatctatgacaaacccacagccaatatcatactgaatgggcaaaactggaagcattccctttgaaaactggcacaagacagggatgccatctctcaccactcctattcaacatagtgttggaagttccggccagggcaattgggcaggagaaggaaataaagggtattcaattaggaaaagaggaagtcaaactgtccctgtttgcagatgacatgattgtatatctagaaaaccccactgtctcagcccaaaatctccttaagctgataagcaacttcggcaaagtctcaggatacaaaatcaatgtacaaaaatcacaagcattcttgtacaccaataacagacaaacggagagccaaatcatgagtgaactcccattcacaattgcttcaaagagaataaaatacctaggcatccaacttacaagggacgtgaaggacctcgtcaaggagaactacaaaccactgctcaatgaaataaaagaggacacaaacaaatggaagaacattccatgctcatgggtaggaagaatcaatattgtgaaaatggccatactgcccaaggtaatttatagattcaatgccatccccatcaagttaccaatgactttcttcacagaattggaaaaaactactttaaagttcatatggaaccaaaaaagagcccgcattgccaagtcaatcctaagccaaaagaacaaagctggaggcatcatgctacctgacttcaaactgtactacaaggctacagtaaccaaaacagcatggtactggtaccaaaacagagatatagatcaatggaacagaacagagccctcagaaataatgccgcatatctacaactatctgatctttgacaaacctgacaaaaacaagaaatggggaaaggattccctatttcataaatggtgctgggaaaactggctagccatatatagaaagctgaaactgggtcccttccttacaccttatacaaaaattaatccaagatggattaaagacttaaatgttagacctaaaaccataaaaaccctagaagaaaacctaggcattaccattcaggacataggcatgggcaaggacttcatgtctaaaacaccaaaagcaatggcaacaaaagccaaaattgacaaatgggatctcattaaactaaagagcttctgcacagcaaaagaaactaccatcacagtgaacaggcaacctacaaaataggagaaaatttttgcaacctactcatctgacaaagggctaatatccagaatctacaatgaactcaaacaaatttacaagaaaaaaaaaacaaccccatcaaaaagtgggcaaaggacatgaacagacacttctcaaaagaagacatttatgcagccaaaaaacacatgaaaaaatgctcaccatcactggccatcagagaaatgcaaatcaaaaccacaatgagataccatctcacaccagttagaatggcaatcattaaaaagtcaggaaacaacaggtgctggagaggacgtggagaaataggaacacttttacactgttggtgggactgtaaagtagttcaaccattgtggaagtcagtgtggtgattccccagggatctagaactagaaatgccatttgacccagccatcccattactgggtatatacccaaaggactataaatcatgctgctataaagacacatgcacacgtatgtttattgcggcactattcacaatagcaaagacttggaaccaacccaaatgtccaacaatgatagactggattaagaaaatgtggcacatatacatcatggaatactatgcagccataaaaaatgatgagtttatgtcctttgtagggacatggatgaaattggaaatcattattctcagtaaactatcgcaagaacaaaaaaccaaacactgcatattctcactcataggtgggaattgaacaatgagaacacatggacacaggaaggggaacatcacactctggggactgttgtggggtgtggggaggggggagggatagcattaggagatatacctaatgctaaatgacaagttaatgggtacagcacaccagcatggcacatgtatacatatgtaactaacctgcacattatgcacatgtaccctaaaacttaaagtataataataaaaaaaaaaacagatatgacataatcacaaaaaaagaaagaacagcacaccagagggaaggagtagtttttattttttattttttattttttttgagacagtctcgctctgtcacccaggctggagtgcagtggcacaatcttggctcactgcaacctctgtctcccaggttcaagcaatcctccttcctcagcctcccgagtagctgggattacaggcatgcaccaccacacccggctaatttttgtatttttagtagagatggggttttgccatattggccaggctgatctcaaactcctgacctcaggtgatctgcccgcctcagcctcccaaagtgctaggattataggcgtgagccaccacacccggccagtagttttatatacttaggaaaaaagtactagatgtgatttttaagttaataacaacttagaacagaaaatccaaacactgccccagtgtctggcccagttccagctcaatgctgcattctgcatctgtttattgtaagatgtgaatgccccatccaactttcttggcagatgtatccttttttacacttttttaaaaactgaaagatgatttcttcatttcttattcagttttgaaagggaggcacagtcaatgatctcgcacgtattccagaaactgacttccttagaccttaacagaagctactcaagtgcacagatgtttgctggttttacatggaggccttgctggctatgaaaaaacattcccctctaattttttgctcaatttgttttaagttggtaatgaaatctgtgaatctgtgttccctttctacaggaaaaatagaattttgatctcttttaaaaatcagaacgcaacaggataatggagaaatcagtctcaatagcacatttcttgttcgtttcagagcggtgatgtaaacacgatgatgctatgcttttggggtctttgaggtttctgccaaaagcatagcagcttaggtggattcgtgcctaccgcatgcttctttggtggatttctgtcgacaaattgtatgtctgctcttctgaaatagcatcatgaagttgttaatgtctttgcataaagaccaccccattctgtttgccctggggacaaagactttgcactaatcaccttgctctctcctggagcgaagagctgaagaggcaacaggaaatgcttatttactgagttcttactgggtaccaactgtggacacccacagaaggggtttgagtaagtatctcctcattgtccaggggccagagtagagaacagaaaggaaacagcttggcctctggttccacaaaataaataagaataaaatagaacattgaacatttgtgtttctttcaccatcttaatgtatgcactttgtagattctgcattcaaacatgtagaacaggctaatgaaagaaaatgccaaggccgggcacagtggctcacacctgtaatcccagcactttgagagtccgaggtgggtggatcacaaggtcaggagttcgagaccagcctggccaatgtagtgaaaccccgtctctactaaaaatacaaaaatcagccgggtatggtggcgggcgcctgtaatcccagttactcgggaggctgaggcaggagaatcacttgaatccgggaggcagaggttgcagtgagccgagattgcaccattgcactccagcctgggtggcagagagactccatctcaaaaaaaaaaaaaaagaaagaaagaaagaaagaaaatgccctcaaatctcaccacccagagacaaaatcattcacttttggagagcattcttccaaatctcgctctcttccaatggttctcagctgaggacaattttggccgcctgcgtacatttggcaatgtatggaaacatatttggttgtcacacactaggaaggggtgttcctggcatttagtgggtagaggctgaggatgccactaagcatcccacactgcaaaggacagcccctctctccaccacaaagaattatccagctcaaatgccagtggtgctgaggccaagaaaccctgctatagacatatggatgtgtagctctgtgataattacataatcaagttcatactatgccagctgctcatcatcctgcaagaaaacatgtatcgcttgtctgctatggtcaagcactgcctgttccttagagagggcctcatttaatttttaccagaactctccaagaggaggaattagtacagatgttacgaagagactgaggttcagagaggtgaagcgccttgaccaaggttgcacagccattagttgtggtgctaagaccccagtccaggtatgagggattccaaactgcctttcctaccgtctgtccatttgctccctttcaccgcaggacccagtttacaaggggcaattagaaacctaagagtaaggcccttgagctcccctttcagaacctgagggaagcattatttaaatcttctccatttttacatttgtcatattttatctgtgaagaataccttcaacttcctcactaatcacttttctgtccattgctcattgttttcctaccgtttaactatacatatgtgtatgctatactatactcataactattatatcttggttgtaggttaaaccctccattagtttgttaaataattttttttttttttgagatggagtttcactcttgttgcccaggctggagtgcaatggaatgatctcagctcactgcaacctccacctcccgggctcaagtgattctcctgcctcagcctcccgaggagctgggattacaggcatgcaccacctcgcccagctattttttgtatttttagtaaagacggggtttcaccatgttcaccaggctggtctcaaactcctgacctcaggtgatccgcccacctcagcttcccaaagtgctgggattacaggcatgaaccaccgcatctcactgaataatgtttaccttgatttctccctcctctgatggtgttgtgactcctgcctcctttctgtttgcatttggctgatatatctggaattattctgcctcaattatattgtttcaggtttgtgctttgcagttggcagattgttgaatttggattggatttacccaacctgggagtcattttctttccgtgggcatgtctttttttaaatttatatttgcttccataacagatatctttggtcttaattctactttcttgttttatgttttatatgcttccattatcttatttcctaatttttcctaccttctgctcatctggcaaacagaatgtgttttgttctactggtgattgttttttatctttgaattacaaggtttaatttacacgttcaaagttttcaacttcaaaaatgaaaaagtagctgtcagccagacacaatggccatccctgtaatcccagcgctttgggggactgagatgagaggatcacttgagctcaggaatatgagaccagcctggacaacataggaagaccctgtctccagaaaaagcaaaaagcaaaaactaaaataaaataaagtaaaataaataaaagtcctggctctgtggctcacgcctgtaatcccagctactagggtggctgaggcacaagaatcatttgaaccctgggagggggaagttgcagtgagctgaaatcatgccactgtactccagcctgggtggcagagggagaccctgttacaaaaaaaaaaaaaaaaaaagaaagaaagaaagaaaaagaaaaagtagctgttgactccgcttatggaagataagaaaattgattccattccaatttctcattctgtcttcacctctatcttctggttttcaattatatgctctgggaatttttgtctcagtcttttaaattttggggttataatgctatatatattttgctttaagaactataatagctacattcttcacattctgttttataatttttccatggttatttatatttaattttatatgtaaattgtctcaatgcacacccccatacaagcacttccttttccagtaatgctagataattttctagtgagttctttgttttgagtcatctcttagttgactgaagcatattttcaagtatttcctcccccacactctttcccccacaagaaggatatatgggtgatatacttcctaaatccgtgcatatttgactcacttgtaaatatcaactttgatgaaattttggatcctattctttttcttttcattgtctttcttgctgcattttcttctggaatctaatgtcagagttaaaaattgaggccatctgatttttattttctttgaagacaacctgcttgttctgcctgaattttcattagactccctttttccttgaaatgtaatggtttcatcagagtctatgtctcactgctagctttttttctctgcttataaatttccttggtaaccctttgagctgaacattcgtatctaccttcacttcagggatgtttcttctattcatatttcctcctcgaatattctccctgttgcatttgtcctatttcttatcctccaagaacacaaattattcccacgtcaattccacatttccctcttctctatgtgtggtcagtgtatctgtcaggatctggtcaggagtcaaaaaacataacacttattttaatagaaataatttaatgtagataagtggtaaccaggtacaaaattgttaactcggtactgaaaagacaaaaagagaacattaacatataatagaggcaacagctgcagagagcaaccattacccaaagggctgggaaacaaagggaagaaactggcagtgttaaaacagggccaggtacagtggctcacacctgtaatcccaacacattgggaggtcgaggccggcaggttgcttgagctcagaaattctagaccagtctggccaatatggcaaaaagcccatccctacaaaaaatacaaaaatagccaggcatgatggtgcacgcctgtagtcccagctactcagaaggctgagatgggaggatcaattgagcccaggaggtcaaggctgcagtgagccgtgatagcaccactgcactccagtctgggcaacagagtaacatcctgtctttaaactaataatataaatacatacatacatacatacaaacttagaagattagaagggctctgcaaagctgaaaatcagacctctgagtagggggccagtgcttagctgtgctggtgtctgagctcaaaagtgagagcccatgaagctgagaccaggatttactggccttgtactccaagcgaagcatttcacacatccccttgccaaggcctggaacaatgacaggttttatgcaaacatacttttaggcgagctgttttcaatcttgcctacacattggaatcacatgaaaaattgtttaaaatactgatgcctggataccaccttttgagagtctcagtaaattggtctggggtgctgtctgagcatttcaagtttttaaagctccccaggtgatgctaatgtgtagccaaggttggcggccattggcctagaattacctctgcataggacctgttaccactgctgagaacaaggaataggtcaatgtctaccttggttttatattatattcacctgagaaaaattgttttaactggtgacggccctcctttcccctagaagtcctgatttaattcactggagttggggtcaacattgagattttttatttccacaggtttttggggaacaggtggtatttgggtacatgagcaagttctttagcggtgatttgtgaaattttggtgcacccgtcacccaaacagtatacactgaacccaatgtgtagtcttttattcctacccccttccacccttcctcccaagtccccaaagtccattgtatcattcttacgcctttgcatcctcatagcttagctcccacttatgagtgagaacatacaatgtttggttttccattcctgagttacttcacttagagtaatagtctccagttccgtgcagattgctgcgaatgccattaattcgttcctttttatgactgagtagtattccatcatgtatatatagagagagagagcacggatttttaaatcccaggggattctaatgtgcagccagggtttaggtaaaggaaagacccataatgcctatgtcccgcatcagtgagttttgataagtgaatcctagacatcataaagaagcaaaatgtccaagcattatgtcaacatcaagaagactaggatggtgggagaagtctaacaattagaacactttaacagggatctcttcaccatgagagtcagaaatagaaacccagaaggcctctcctctctctctcccccactccgacttctctttctctgtcttctagctctcctatcacacacacacacacacacacacacacacacacacacacacacacattcatttgttctacagtcgaaagaacagcattagaagaaagttgtccaggtgcagtgtctcacgcctataatcctagcagtttgggaggcagaggcgggagggtcacttgagctcaggagttcgagacctgactgggcaacatagtgagacctcatctctaataaaaaaaaataaaaataaaagttatgagtatgagctgaatagataaatttccatttcctttggtataactgtggggtagctttgggccttattgtcctagggggatggttctcaaagtgtgatccctggaccagtagcatcggcatcacctgggaactttcaagaaacgcaagttcttggggtctacccaagatccactgaatcaaactctggaggtggggcccagccacctgtgttttctacgagcctttcaggtgactctgatgcatgcttaatttgagatccactgcccaaagcagtggcatctggaaaagacacaccagaaaaacacaaaacattacaaggcctatgcctcaggagccccttcagtagatgactgccaagaatagcccactcaggcagggtgcaatggctcacacctgtaatcccagcactttggaaggccaaggctggcagattacctgagatcaggagtttgaaaccagcctggccaacatgatgaaaccctatctctagtaaaaatacaaaaaaaattagccaggcatggtggcacatgcctgtaatcccagctactcgggaggctgaggcaggagaattgcttgagctcaggagacagaggttgcagtgagccgagattgtgccactgcactccaacctggccaacagagccagaccgtctcgagagaaaaaaaaaaaaagtagcccaccctccctctggtagatgaactacatcaccatagcaacacaaatgctcctggtgggtctcagatgttcaccatgagaacatctttccttaataacctaggaggtttgtatgtagtcagactcttgtgccctttgtccctttgcttgcctgtgagaactaataccacctttgtgcctttttcttcagcatgctaagaactatttttgtctaatcccacttcatcctctcaaattggtgcaacttctcctcggattttgacaatggatcttccagtggtcttcgctttgcctactgttgtgacttttttttttcctgtagtataccttcattaatgcctcctgaggtctgttgcattagctttttggatatccacatcaaactacagacactgattaaactcacagtaaactaaagctcctgattcattttccatgagtaatactaagtcatatcttcttccatcttttatctaagctgctgatattttggacccaagtatacaacctcacaacatcttgcaatattttagcatgtcattggtaaaatatcatcagttatctattgttgtgtaacaaaacatcccaaaactttaaataacaatcatttatttgttcatgattctgcagtttgggctgggcccatccaggcagctcttctgctggtcctggatgactcatggagtggtagtcatcttgtagctcagctagagctgaagggtctcagatgacctcactcacatgcctgtggccttggtgctagctgttggctgggatttctttccacatggactcacatactctaatagtctagcccaggctttcttacatgggagtgtgagcacgccaagagggtaaagatggctctggaaatagcacaacttcactgctgccgcatactgttgaacaaaacaagtcgtaaggccagcctggattctaggagtggggtaatagaatccacctcttgatgtaaaaatgtacaaatatctcatggccatatgtaaactaccacatcttccctgtctcgtttctccactttctgactggttctttctgggatcaccccccagataaactacttatacacaaatccttttctcaggatctttgaaggtcactctaccaaagaaactcaggctcagagcttggtccagaaacttcatctcttctcattccattcttgccttagcaatctcacccattcaaatgtatacaccaaaaacttccaaatttctacctctggcctcactcagacagaatatccaactcttctcacaagcccactggaggccttccaggtatctcaaatttaatatgccagattgaagtcttgatttgcaataccccgccaacttcctctgccagccatccccatctcacctccatatgcctaattggcactccaatggcccctccatgacattccaaaaacttctccatatcccaccaatcctcatgtcccaatgattattcttccaaatacttctcaaattccttttctcatcacaactgccaccactgcggtccaaaccacccccatctctctactaactgatctctctgctttttatcttgttcccccactccaacagcagcttagaaatcaaggacaacagccaaatattcagccaaggaaagctcttgcctggtccatttctgcaggaccttctacattttctacctcaatcagctagtcactgtgagaactactgtaaattaacaatatattgtagatcaggactaattgcaataaatatgttattataattctcaaataaaatgttggcttccattaaccaagtgtgaaaattttgattatggtgttttgcacatatgtccatagttactatcaccaattagcaagctaatgccccaaacaccctcattagtgcattcatttatgacatatcaacaaaaataaaaagctatgatgctgtgactttatttttctaaattccattaaggacaaggaaaaaaatcatagtactatttatgcaaggttgtagaagcaatcattacacattacaatataaaacccaaccacattttcaaagtgtttgccgagtgtacaattccataaaagagaagtgccttgcatagaaacaccgccatgccttggatattgctggtacttaataaacgtcctttgactaaagttgttgcatgttagagctgcaaagttttttgggactaattctgcacaattatgaggcttagaagagtgcaatgactttgctagggcatcacagcttggaagtaaagctaggaccagagacttgctgtaagccagagtttgtcaacttcagcactgctggattggtaactttggtttggataattccctgctgtagggctgtcctgtgcattgcataacatttagcatccctagcctctctaccaccagatgtcagtaatatcaccccaaccaatcaagacaatcaaaaatatctccagacattgccaaacgtcctctggcaggggtggggaagaatgcaaggtactgcagaatccccctcagttgatatattggtctgttttcatgctgctaataaagacatacccaaaactgggtaatttataaaggaaagaggtttaattgactcacggttccacgtggctgaggaggcctccaatcatggagaaagtgaacttggagcaaaggccatcttacccggcagcagacaagaaaacttgtgtaggggaactccgatttatataatcatcaaatctcgtaagacttactcactaccacgagaacagtgtgggggaaaccacgccatgattcaatcatctccacctggccctgcccttgacacgtggggattattacaattcaaggtgagatttgggtagagacacaatcaaaccatgtcagtcgagaaatattgtaaatgtagattagtggttcttaaaatgtggtccccagaccagcagcagcagcagcatcacctagaacttgcttaaactgcagttgatcaggccacactccagatccactgaatcaaaaaccctgggggtgcgtcccagcaataagccctccaggtgattctaatgcacagtcaagtttcagacccagcaataaagattatccctaacccttgcaaggtaattgctcatgttccagtttcataaataagaaaatcaggctcaaagaggttacctgttttgcccaggttctgatatagcaatggcagagctaggacttgaaatgggctcagtataacaccagaggccagctctttctgctctgccttgcctccttgaacacaaggcagcagggaaaaggaaagcctggactggacttcaggctgactctctcgtaccacgagcaccacgaagacaaagtccacaatgccacagctgtcaggcctctgagcccaagctaagccatcatatcccctgtgacctgcacgtatatacgtccagatggcccgaagcaagtgaagaatcacaaaagaagtgaaaatggccaattcctgccttaactgatgacattccaccattgtgatttgttcctgccccaccttaaccgagcgattaacgttgtgaaattccttctcctggctcagaagctcccctactgagcaccttgtgacccccgcccctgcccgccagagaacagccccctttgactaattttcctttacccacccaaatcctataaaatggccccacccctatctcccttcgctgactctgttttcggactcagcccgcctgcacccaggtgattaaaaagctttattgctcacacaaagcctgtttggtggtctcttcacacggacgcatgtgaaaacagccgcttttgtggttgccgtggccctttgggggtatgaggtaagaaagagaagagtctgagcctaaagaggatcatcaaacctactagatgctaatgaggccaaactgagcacattaggggcaaagacactgtgtctccagacccactcccaaatgagcatcctgaatgaacctttacctacccagctcccctcttttctggggaccctctctaggaaccttccccaccatttacacagttactatagaagcaacgattctgtatcccatgacctcattcctccagccacagctgtttggctcgtggtggccaagggagcttgacctaagttgaaccaattactccctgtcctgaaattctggacatgggacaaagcgagaattgaatctgtccctccctatgagggttgaaactgagatttcatgctccagagctattggtcgcaatgttgttctaccacttccatgcaagtttctttcacttacaacccaaagagatctgactcaaacaagaaaacgtccctttcactattacagccacccaagggtaagaataacatttcacaacatgcaggagacaagggggaaataaaccatgcaagcttcaccctcaactcagagaggtgtgttctggaaagttcctgcccacctcgtccatgacctgtggcctctgaagatagtgctagtctccttgaaaaccagagccatatgggatcccttggccccagaagttatcactagaatctccccaccatgcctcaagctgatggcaagattccacatgggaaggaggaagggaaaacattgtgagtcaagggactgcaagttactaaaggttggagatatgtttaagagacaaagaaatgcgggtattttggaggaaagagtgaagaaatacttgaaaagctgtgactccagactccccccaccgcttccaaattaacccccaccatattcaccactgaatccacaacaatgaaaagtgcctgaggcaaagacagcatacatgctcttttgctaggtgaagagagggagggataaatgttcaatgagagccttgtgtttctctaaaggcacagaactaggagcatctggctgaggtgaggggcgaggacttggggtgaacctggcaacaccttttggctggcagatcacaggtaggtggggaaagttacctcaaggagtgtagaaagtaaaccaaccacggagagaaaagcctgcctggaaactgaccaactatgtaattctgagctactcccttcacatctctgagcctcagtttccccatctacacaaatatagcgctgtcctagctctccctctctctggtccctttcttctcccaagtctgagaaaatttcatggggtgggggtgtccccaaactgttaaagcagagccgtattccaagtccttggcagagggggtctcactgtccatctgctggttctccatgcagagagacaccagaatgggtgggtatttgggaggtctccaacttctctgagaacatcactgcagatgctcctgaaaagggtgagacgtgggccttttggcgagtgagaagtttggagtactgccagtcagtcccgtctgtccccatgctcaccagacaggcaccatcccccagtgcaaagcaccaagaattccccatgggggtggggagaaggcatcaggtggagccccttcccccgcttccctgcccaggtatcaaaagatgaattccaggaactgccgggatggtgatgatggaaattacgcaactctcccacggagacacacacggccacatttaggggcatccttttgtcccagtttagtccacttctgctcctcgttgccctgggcagtcaagtctcttttacaaagatgtttctcaagccccaggtaatgtagatacaaatacagtcatgtgtcacttaatgatggggataggttatgagaaatgtgttaggcaatttcgttgttgtgtaaacatcagagaatgtatttatgcaaccctagatagtatagtctcctatgcacctaagctatatgctatagcctgttgctcccaggctacaaactgttcggcatgttactgtcctgacgactataggcaatggcaacactgtggggagtatttgtgtatctaaacatttttaaccaagatgactgggtgcaaattactaacaaacaatgtcctttgattgagaactcacaggccgggcgcagtggctcacgcctgtaatcccagcactttgggaggtcgaggtgggcggatcacctgaagtcaggagttcgagaccatcctggccaacacggtgaaactccgtctctactaaaaatacaaaaattagccgggcatggtggtgggtgcctgtaatcccagctacttgggaggctgaggcatgacaattgcttgaacctaggaggcggaggttgcagtgagctgagactgcgccattgcactccagcctgggcaacaagagcgaaactctgtctcaaaaaaaaaaaaagagagagagagaactcacaatatcctagggactgtgctaggcttccttcacttaactgtcacaacaaccctatgcaggaggtagtctatcccctatcgaatactgatgagtaaactgaagttcagaaaggcaggactcagagactgggactagcaagactagagccagagtgcaagcaggtgtgcgctggtgtgtccagcatgggagattctctggtattaaaatctaggctcagaggccgggtggaatggctcacatgtgtaatcccagcactttgggaggccaaggtgggcggatcacttgaggtcaggaaggagttcaagaccagcctggccaacatggtgaaaccccatctctactaaaaatacaaaaaattagctgggcatggtgttgcatgcctataatcccagctactcaggaggctgaggcaggagaatcgcctgaacccgggagacagaggttgcagtgagccaagatggcaccactgcactccagcctgggcgacagagaagaactccctctccaaaaaaaaaaacaaaaacaaaaacaaaaacaaacaaacaaaaaaaaggcactccagcccggacaacaagagtaaaactccgtttaaaaaaaaaaaaatctaggctgtgctgggaagcggtgtggcacagtggttaggggcacaagctctatggacaagagcttgcaaacgcaaatcccttgtgccctaaccactgtgccacactacttccggcatagcccagatcttaaaaccaaagaatctcccacactggacacaccagttcctcacctgctggcactccagctgcggcctcactagccccagtccttaaagagctgccacacccctgctcctgccacatcctttcctctccctagaatgtttcaggctctgctcatggtccctcctccatgaagacttcctgagcctcccaggcccctaagagagaattaacccctctctccttcactccacccctgctggctctagatgcatccatcacaggaaacgttcccaatatttttattttttcaattttattttagattcaggggatgcatgggcaggtttgttagaagggtatgttgcatgacattaaagaaaatgtggtacatatacaccatggaatactacacagccataaaaaagaacggattcgcgtcctttgcagcaacatggatgtagccagaggccattatcataagcaaactaacccactattatttatatacccattgcagccttgtggcttccagtcttctgggaaatataggccaggccttacccatttctgtatgcccaggatccaacaccgtgccaggcacacaaagactctcagtaaataatgagtgaataaccaagtaaactaaaacctcacccaaaatccaatctcgagctacccaagacagcaagttcatggggcaggaatgcctggcacatggcacacgctttctcaatacaaacttacatcatgaataaaataaatgaatgatagcatagctgaggatttacacccttatttctagtaactctcattgtaggtgacacaaaggattgggtccagatacaatcttaatgtattagttcgttctcacactgctacaaaaaaactacctgagactgggtaatgtaagaagaaaagaagtttaattgacttgcagccccacaggctgtacaggaagcatggctaggaggcctcaggaaacttacaatcatggcagaaggcaaaggggaagcaagcacctcttaccacaacagagcaagactgagagagagagcaaatggggaagtgccacacgtttttaagcaaccagattttgtcagaattcaccatcatgagaacagcaagggggacttgcgcccccgtgattcaatcacttcccaccaggtccctcctccaacatatggggattacagttcaacctgagatttgtgtgaggacacagagccaaaccctatcacttaggtttggaaagggaaacatcagacttgctagttgaaaagcaactttgtaaaccttaagccattattcagggacagtaaaccttcaaaacacaataagaaaataagtcttcaatgcaaaactttaacaattaaaagatgttagtcgttctgcattgcaaacaggattaactaaactctgggggtaaggagggtcataagatccccaaaataaaattttaatatggtatatgaagcctttctgagagttgaattcttccagaagcagaccctgagacaagaatttgagtgtaagtaatttatttgggaggtgactcccggaagcagcagcaaggaagagggaaagaaagacagaaaggatggaagccaattaatagcatgccgtcagtccagttaccaccgtgggcaatgagagctcaatcctactgggtagctctggggaacagtatggaagacttggctctgaattaatccacctaaggggaaggagaggtgaggtatttatactccaactcccatctgtcattgcctactcccagagccattaactccccagtgttcccagccctccaagcacagggctgagaggaaatcctcaagtggagacaccttcttacatgtacagggacagcaagtggcaaaggcatgagtcggggtgagtgagcagggccagctacaaagcccaagaggaaaacctggtgtgataagaggaatttgtttccaactaacaggcatcagaacctaatgaaaactaagcaagaaagtggagatctaagacaaaagaaaactctgggccgggcccagtggctcatggctttggaaggccgagatgggtggatcaccagcgatcaggagttcaaaatcagcctggccaacatggtgaaaccccgtctctactaaaaacacaaaattagccaggcctggtagtgtgtgcctgtaatcccagctacttgggaggctgagacaggagaatcccttgaacccgggaggtggaggttgcagtaaactgagattgcgtcactgcactcccgcctgggcaacagagggagactcaatctcaaaaaaaaaaaaaagaaaaaacaaaaaaaagtctggacagagaagaagttagaaccttccatctgcctctcctctgttccctctgcaatgtgtatgtctggctttcgtcttctctcccctccccaacctggaatctattttcttctcagtctgaatctttcttcctcttccccctcaagagctccccacccacccctcctgtcccgattttctcacccctcaagagcccataacatgaaagtgaagtatcttgcttaatatttgtttacttaggaacagtgagttttatgtacactgttcttaattaaattctcagcaagtttctatttgtggatggagaggcattctgcccaaggaggggggccttacaatcttggcaccttgttactgattcaccccccagcacttggaaggaacacttgggattcagtctttcatttggggcccatgaagctactcgtgttctcagcaacactgattattggcaatttccctctgtgagggaagtagatttccttccagacatcctgtagtggtgtttccgaaggagtagtgactcgctgcttcatctgcgtgggcggcccgatagataaatgctcatgcaacgcgccaggcgggggatctacaaggaagcacttggtctccacccaaatcacagtctggagttctcgctccccgctgtcatttctgggagtcctctctaaagggctgcatcaagaaagcaagcttctcactgtcttccggacccttgactttcctcaagaccacccggatgtcacctcctccgaggagtcttccctgactaccttgagccagcagccaccctctgctttgtgctccctgaattggggtccacctgcttggacagcaggcccagattgtgtgtctgctcaccaggctgtgggctcacagaggacagagtctccatcttggtcgcttgtctccctgaaagtttagcatagagtataagcttagtaaatgtttgttgaataaatgaatatatgaatgaagggattgaatgagtgccaggaggacttactggagccttggacgggcttgtaggaactcttgggctgacagctagccagaaacgtaaggagcccagagtccaggaagcctggtgtttttcaccccgggctgggggcggggccagaggaggcctaagggactgaatttctcccagatagagccaggaatcttcactcctgttgatcttacatactgggcttctagaaatggagttccactcctttaaaaagttacaaaaccggccatgtgtggtggctcatgcctgtaatcccagcagttcaggaggccgaggtgggtgggtcacttgagaccagaagtttgagaccagcctggccaacatgatgaaaccctgtctctactaaaaatgcaaaaattagccaggtgtggtggtgcatgcctgtaatcccaggtactcaggaggctgaagtaggagaatcgcttgaacccgggaggtggaggttgcagagagacaagactgcgccaccggactgcagcctgggtgacagagactctgtctcaaaaagaaaaaaggttagaaaaccattattccacattccagcctcagcatgttttagactggcatggcatagtcaagggaggctgctctgggacctgggcttactgactccctggcccgggctggctcagctcaaggccacagccacagccacccacaggcatggttctggctcctactgagggcctcacacctgaagactcagccagagggggcacccgcccagccctgtaattggagtctggggtcgggagatgggtgttgggcaactgggctgcgggggactgaggctaaccgcctccaggtgtgggggaggccagaggacatggaagggagaccgcaaggtcagggtgaagctcgggagcctaggctgggttcatggggccaggacaaggtcccttccccaagcctggacaggtgcatcacaggcagccacagccctgaaagatgagggttaggagagcctggagcacgagctgaaacgggtgaatctgcgctggacctcaggtctccctccccgcaccctgcgttgtagggaagagcaggaaccctggcggcctctgaggcgggggcggtggggggcgctgggggcgcggagttgcagccggcagaggagcagtggcgccacctcctgacgccttcggggaacgcagctgatgccagccagcctccggcctctgaagggggcatggggtgggggaggccccgggcccaaaaaagcagatcagctatttacttccccatgcacaattttttttatatgttattaaggaaaacttgaaatatgtacaaaagtagagagagctgtcataaactcccagatacccatcgttccacttcaccaattcgctcatggccaatccgacttcctctctaaccaccctgcactttctcctccccgatgtatttcaaatcagattaaatcctgggcattatatcatttcactcctaaatgtttcaatatgtaacataagtatttttaacaatacaaccacaataccatattccacaaaataatacttatttcttatcatcaaataatacagtctcataaatttttaaatgtttttctacagtttattaatcatgatcctcataaagtccactcactgcaactagcccactgtttttgagtgcctcttcctctgtatgcctcccctcctttctgtcttttttccttgcaattcatttgttgagaaaacctggttgtctgtcctgacatgtcccatagtctggattttgttgtctgcatccctgtcatataatttcacgtgttcctcagattttctgagttgtagattcggtccgttggagttgaatccggaggtttgttcagattcagctttggtctcttcttgtgctgtcagctgccattggcaatcattacctgcatccattatgtcaccggggactgtaaaatggtgatattccaattctgtcattagcagtttgcttttttgctttgttttgtcttgttttttgtttttttgagacagtcttgctctgtcacccaggctggagcgtggtggtgcgatctcggctcacagcaacctcagcctcctgggttcaagcaattctcctgcctcagcctcctgagtagctgggactacaggcatgtgccaccaagcccggctaatttttctgtttttaatagagacagggttgcaccgtgttggccaggctggacttgaatgcctgatctcaggtgatctgcccgcctcaacttcccaaagtgctgggattacaggcatgagccaccacacccagccagctgtttgcttttaaatcagaggttcattatgatataggcacaacataacagtattcataacaaggataaataggttattgccatcaagcaaaagatagggagtctaagatttgatgaacaatgtaagatccagtactgtgctatttacgagcaagcacttaaacaaaaggatacagggagattgaagacagaaggattaaaaaggatatagcagacaaatatgaaccaaaagaaagctaaggtgatcatcctaatacctgacaaatataagttaatgcaaacaataatgtcataagaagaattacagattttcaaatagccacccatgagcatataatttcacgaaaaactgtagcttcaaaatacataagatatcaggctgggcgaggtggcttacacctgtaatcccagcactttgggaggccgaggggggtggatcactttaggtcaggagttcaagaccaggctgggcaacatggtgaaaccccatctctacagaaaaaaaaaaaaagaaaaaaagaaaaattagccaggcatagtggagagtgcctgtggtcccatctacttgggaggctgagataggacgatctcttgagcccaggatgtggaagttgcagtgagctgagatcatgccactgcactccagcctgggtgacagagtgagacccgtctcaaaaataataataataataataagatgtcaaattacagaattgcatagagaaataaatctacaattattatttagagaatttaattcatctcccctagaaactgaccaaacccagacaaacaactatctcaatcagcaagctaataagtagatgcagaacatcacacctccaatcagggtgatgctcgctgctcccagaattccaaacaggcctggcttcactcaggcgactcctagaattctgagaggcccagccctgctggcagtgtgacagggtcagattttgagacccctatgcttctctgtctttgcacacaaagagaaccaccttagacttgagcgaccaggacctccctgccttgtgcccctatttagagggcccttctctggccttcctatagctatgccccgcccacagggcatggaattcgtaagaccaagagcataagcccaccttcctggtcactgctgcatggcccaggaaggggaaggggcacaggtaggacctgccgaaatggtcctgagcctgcctctaggactcacatcatttttctttgggtccttcctcccaacgatggactgccctcagtgtgtgcactctcaagctcaaagagcctaaaggaggctatttgttggggggatgatggaggtgagaagggcttggagatggagagtggactgaccacagcatgcaggaagaccctttgtggtacagacaaagatggggatgggaggagaaaaggaggagctacagaccagagcctccatctgtgctcttgcccccaaacctctcatgtgttagagttgcacacgaacgtcacaaccctgatcacaccccttcccttcccctccgaggctggtgataaaacacaaggagcaaaaacaatcactgctggaggcctaattatggcaagcagcctggcaatgctgtatatagactctgctttgagcaaaatgtgctgatttatgcagtttccaacatttaaaggtggagaccagactgtggctgaattggatcagatcattctctgggacaaattacaaccctgggctgctgagcaaaaatttgtaaagaattgtctctctctcctgccccttctttcccagaactaccagctccaccatggattctctggccattcctttgaccctttgtcccttcctcaccccagcccagcacaagggctggcatggagtggcagcttataaaacatctgctgaatgaataagtctatttcctagagggtgagccctattggatggggtgcactggacaaaaccacctaacctagtgtcaaccatagaagcttaggatctagactactgggttcaagttcctgttctcagtagccctttcttgtagacccacagtccccaagttgtgtgtcaagacatctgtgatgaactgaatgtttgcatcccgcaaaattcatattttgaagccctaccctgcaaagtgatggtgtttggaaacggggcctttgggaggcaaatacagttagattaggtcatgagggtggggctctcatgatgggattagtggccttatgaaaataggaagaaagatcactctctctttctgccatgccaggacacagtgagaaggcagccatctgcaagccaggaagagagccctccccagtactcaactttgctggcatctcgatcatggacttctagcctccagaactgtgaaaaagtaaatctctgctgtttaagccacccagtttatggtattttgttctagcagcccaagaagatgaagataacactcctagggtccaagtgcaatggctcacccctgtaatcccagcactttgggagcccaaggcagcagatcacttgaggtcaggagtttaagaccagcctggtggacacagtgaaaccctgtctctactaaaaatacaaaaattagccaggtatggtggtggacatctgtagtcccagctacttgggaggctgaggcaagagaatcgcttgaacctgggagatggaggttgcagtgagttgagattgcaccactgcactccagtctaggcagtagagtaagactttgtctaaaataaataaataaataaaatagcactcctaggcactgcagcacacacaggaggggaacatttattatcttacctgttttaaagaaacataatatttgtcagatacccacaaactacagctcaaggcagttcactgtttcaacattagcttgtgctacatcgctttcagtgacatcatatctttgaaaagctgggttttctgtagttacagttataaaaagcaaacatcacgtgaaaatcaatgtagaacagaaaatgaaggaagcaacgtccaatctgattcaagttttgagaagctgtgcagtgcccaacaggcatatgcatacatcccatgactatgtcattctggttgagatggaagaaaattattttttgtttcaatttatgtgagttattttttcaaacagtgactcagctgttagggcataaagagttgtaagttgtctgcacctaattacttaataaacaaaactattaggtatttctttaggccttggggcaccatgaaaaagttactgagacactgaaggcattgggaacggagaaactgtgggagtccccgtgttaggcattttacttcatcttatctgggcgtcagttttcctatagataaactggaggccaggcacagtggctcgcgcctgtaatcccagcactttgggaggccgaggggggtagatcacctgaggtcaggagcttgagaccagcctggccaacatggtgaaaccccatctctactaaaaatacaaaaattagccaagcatggtggcagacacctgtaatcccagatacttgagggactgactgagacaggagaatcgcttgaacccaggaggtgggcgttacagggagccgatatcgcaccattgcactccagcctgggagacaagagtgacactccatctcaaaacaaaaaaaacaaacaaactaacaaacactggagataataagtatatatcgcaaggttattgacaggatgaattaagtgaagataaatgcagtatttagaatggtacctagtgcataacaatagctgcatatatgtggttattattacacagaaaggccaaattggtagttgtaattatcacagggaaaatgtctaaaatgcagcaaagaacaattttccaacattctcttttttattaataatgtaattaccatataccaagtacttggacatgcattacaaagagcactggactgggagtcataaggagatgtgttccagccacagttcagccttgaaaccttgagcaaggcactccctccccctgagcctcagtttccacatcagtatatcatatgtgtggtggtgaccatgggttttgtggggcagggttaagactctttcctcaactgtgcaaacaccaaagggaccaggccaccgatggggaagttcctcctatattacaaacagagaaaaacttaagaagtcgttaatattttgaaattgatctgctaattagaaactctctttgggctgggcgtggtggctcacatctgtaatcccagcattgggaggctgaggcaagaagatcacttgagcaccggagttcaagaccagcctgggcaacatggtaaaaccccatttctttttttttttttttttttttaatgttttttttttttattatactctaagttttagggtacatgtgcacattgtgcaggttagttacatatgtatacatgtgccatgctggtgcgctgcacccactaacgtgtcatctagcattaggtatatctcccaatgctatccctcccccctcccccgaccccaccacagtccccagagtgtgatattccccttcctgtgtccatgtgatctcattgttcaattcccacctatgagtgagaatatgcggtgtttggttttttgttcttgcgatagtttactgagaatgatggtttccaatttcatccatgtccctacaaaggacatgaactcatcattttttatggctgcatagtattccatggtgtatatgtgccacattttcttaatccagtctatcattgttggacatttgggttggttccaagtctttgctattgtgaatagtgccgcaataaacatacgtgtgcatgtgtctttatagcagcatgatttatagtcctttgggtatatacccagtaatgggatggctgggtcaaatggtatttctagttctagatccctgaggaatcgccacactgacttccacaatggttgaactagtttacagtcccaccaacagtgtaaaagtgttcctatttctccacatcctctccagcacctgttgtttcctgactttttaatgattgtcattctaactggtgtgagatgatatctcatagtggttttggtttgcatttctctgatggccagtgatgatgagcatttcttcatgtgttttttggctgcataaatgtcttcttttgagaagtgtctgttcatgtccttcgtccactttttgatggggttgtttgtttttttcttgtaaatttgtttgagttcattgtagattctggatattagccctttgtcagatgagtaggttgcgaaaattttctcccatgttgtaggttgcctgttcactctgatggtagtttcttttgctgtgcagaagctctttagtttaattagatcccatttgtcaattttggcttttgttgccattgcttttggtgttttggacatgaagtccttgcccacgcctatgtcctgaatggtaatgcctaggttttcttctagggtttttatggttttaggtctaacgtttaaatctttaattggtaaaaccccatttctataaaagaaaaatgaataaatatatatatgttaagaaactgtctttatcagctcattgggataagtttctcttgactctggaggtcactgaaggaatcagtttctcggcttcctctgagtcaaaggtaatgaagccagtcagagctccaaaatcattggcttccaactgatccagacctttcactaaattagaccatctcagaatgtgtcgaaatagtgagggttttgccagctgtataatcagttccatattcaatttcttaaatagagatttgttgataaaccaacctaccatttttaaaatgtagttttgtcttccccccccccaaaaaaacaaaagactttcttttaaaaaaagatctcagttttcatcagatcaaatttcctttgccatttgcctctagggttcctagggattctgattttttttaatgctgagttcactcctttatattagatcgtcattgaaatggacctcactcccatagaggggtgattatgggtttattccttttgcaaggctgatggctgacagaagtgatactgctggtagcttcaaggaaatgtgttttataaaacgaggactgagattgttataaagctgattttggcacgtttttctaacttaaaaaaatgaaaatggaaaaatggtttctctcagatgaagggttctgcgtgtatacacaggatttcaaaatctaaagccccccccctctccataatagaaataaagatgagtgtcactccctgacctccacttcccattctccaggccagccaggtctgtctctaagcctggagcagaaagctgagctacccacggctcccagattctccctgacggcacatagcatttggatgtgagaatgttcagactcaccccaacaaaacaaatgagtacctttgagcttttaaaaaaaaaaccaccttggtcaggtgcagtggctcacacctttaatcccaacattttagcatgccaaggcaggagtatagtttgagcccaggagttgaagaccaacctgggcaacatagccagaccatgtctctactaaaaagacaaaataatagccaggcgtgatggcccgagcctgtagtctcagctactcaggaggctgaggtgggaggatcatctgagctgcggaggtcgaggctgcagtgagccatgatcatgccaccacactccaggctagaacctgggtgacagactgagaccttgtctcaaaagaaacaaaaaatcaccttggctcacccttgaaactgattccatgacctcagagacacccttggtagaaaaatcaggaaaggcctcccacagttaagagttaggacccagaccatccttcccatgtagcttctagagccagatggtccaggttcaaatcctggctctgccactagccagctgtgtgactttgagcaagtcacttaacctttctgtgctttgcttttctcatatgccaagtggaagtaacaattaagaatcaaatgacttagtatttgtaaaagttcttaccataagagctagtgcgcattatttgatgaaagcaagcggctggggttttgtcttatgcctggccaacagatggtcgtcctcctctcccagcctgcgcctcagagtgatccatgtccccagtgagctcactgcccacttcctaactttcacccactcctgccttccgctccagagaaaagtctgttcaggccttaacattgctcaacaactcttgatttttcctagtccatccttttgccgtcttcatggattcagtgtcagatctgcctctcccaccaaatctctgagcctcactcacacttggcttctctccttcacagagaaaataatgctgtcaaacagaaaccccacaacctccttccatgcctctcactctgtcctgctcctgaccatgcctcctttctcccctactctccttcttaccagagtggaggaggtcccatccctccaccatctgaggttggttgccatccccagtggggcctgccagtgcagttgtgccggttgtgcactgtacaagggcacctagccaaggtgtcagtagaaacgaaaatccaaccaatttgtgccttccaaatcctttatcccagcaggagatacccagacatgtgtgctttttctaaatcatccactgagaagggcccatttttcaaatttaagcaacaattttttttttttttttgagatggagttttgcttttgtcatccaggctggagtgcaatggtacgatctcggctcactgcaacctccgcctccttggtttaagcaattctcctgtctcagtctcccacgtagctgagattacaggcgctgccaccacgcccagctaatttttgtaattttagtagagacagggtttcgccatgttggctaagctggtctcgaactcctgacctcaggtgatccacccacctcggcctcccaaagtgctgtgattacaggcatgagccactgcgcccggctaaacagatatcttataggcaagtggagatcgtggcccctgagctcaaaacctcagatagccctgttctttcagagcctttatcacactgtcacctctttattagcctgtcctttatcagcttctaccttcagtctcagagctgtcgtgagcagaggatgacatgaaggaaaagcagccaacacttgaaatggtgcaaagaaattaccgcgtatccttcagtgctgggtgttgcaagtcagatgcctcccccattatctgattctccaagaactgagctgtccaatacggtagccactagccacgtgcagttactaaacataaaacatgggtactcaaaatcgagctgtgctgttaggtacaaaacacacactggatttcaaagacttagtaagaaaaaaatgttaaatatttcattaaggccgggcacaggggctcatgcctctaatcctagcactttgggaggccaaggtgagaggatcacttgagcccaggagctcgagagcagcctgggcaacagtgcaagtccccatctccacaaaattttattttaaaaattagctggacatggtggtgcatgcctgtagtcccagctacttaggaggctgaggtgggaggatggcttgagcccaggaggtcaaggctaccatgacccacctgggcaacagagtgagacctgcctcaaaaaagaattttcattaataattcttatatcacatgtttctagggctatcataacaaagtagcacaaacagcgtggcttaaaacaacagaaatttattgtcgtacaactctggaagctagaagtccaaaatcaaggtgccagcaaacccatgctccctctgaaacctggaagggggaaccattgcctgcctgctttctagcttctgatggtggccatcaattcttggtgttccttggcttgtagctgcctcatacgtgcctctgtcgtcgcttggtgctctccctgtgctgtcacatagcatcgtcttagaaggattcccatcacagtagagattaagcgcccatcctactccagtatgacctgatcttaactaattacatttgcaacaaccctatttccaaataaggtcatattctaaagtactgaaggtgaggattttaacatgtattttagggaaacacaattaaacccacaacacatgtgttttgttttattttgttttgttttgtttgagacggagtctctctctgtcacccaggctggagtgcagtggagccatcttggctcactgcagactctgcctcctggattcaagcaattgtcctgcctcagcctcccgagtagctggaattacagatgtgcaccaccacgaccggctaatttttgtatttttagtatagacagggtttcaccatgttggccaggctggtattgaacttctgacctcaagtgatccgcctccctcaacctcccaaagtgctgagtgacctgacccggccccacaacacatgtttaaatgatactatttgaatacattgagtgaaattaaatacaatgattgattgcatttgaggcttacattacatgtctattgggtggcaccgctctaggggtgtgtactgtagtttgacttgttatttactattgattagggtagcttacaactctgaaaaagaaaagtgttaatccatagaaaaccaatagcaaccaataaactttatcctgtagcgatgcaaatgaaaagatcataacccaaagtttctggatttcttctgtatgtactttagcagtcttattccaacattctttctctttttatttatttttttttattataccttaggttctagggtacatgtgcacaacacgcaggtttgttacatatgtatacatgtgccatgttggtgtgctgcatccattaactcatcatttaacattaggtgtatctcctaatgctatccctcccctctccctccaccccacgacaggccccggtgtgtgatgttccccttcctgtgtccaggtgttctcattgttcaattcccacctatgagtgagaacatgcagtgtttggttttttgtccttgcgatagtttgctgagaatgatggtttccagcttcatccatgtccctacaaaggacatgaactcatcattttttatggctgcatagtattccatggtgtatatgtgccacattttcttaatccagtctatcattgatggacatttgggttggttccaagtctttgccattgtgaatagtgccgcaataaacatatgtgtgcatgtgtctttatagcaacatgatgtacaatcctttgggtatataccctgaaatgggatggctggttcaaatggtatttctagttctagatccctgaggaatcgccacactgtcttccacaatggttgaactagtttacagtcccaccaacagtgtaaaagtgttcctatttctccatgtcctctccaacacctgttgtttcctgactttttaatgatggccattctaactggtgtgagatagtatgtcattatggttttgatttgcatttctctgatggccagtgatgatgagcatttcttcatgtgtctgttggctgcaaaaatgtcttcttttgagaagtgtctgttcatatccttcacccacttgtcgatggggttgtttgggtttttttgtaaatttgtgtaagttctttgtagattctggatattagccctttgtcagatgagtagattgcaaaaattttctcccattctgtaggttgcctgttcactctgatggtagtttcttttgctgtgcagaagctctttagtttaatgagatcccatttgtcaattttggcttttgttgccattgcttttggtgttttagacatgaagtccttacccatgcctatgtcctgaatggtattgcctaggtttttcttctatactttttatggttttaggtctaacatttaagtctttaatccatcttgaattaatttttgtataaggtgtaaggaagggatccagtttcagctttctacatatggctagccagttttcccagcaccatttattaaatagggaatcctttccccatttcttgtttttgtcaggtttgtcaaagatcagatggttgtagatgtgtggtattatttctgagggctctgttctgttccattggtctatatctctgttttggtaccagtaccatgctgttttggttagccttgtagtatagtttgaagtcaggtagcgtgatgcctccagctttgttcttttggcttaggattgacttggcgatgggggctcttttttggtttcatatgaactttaaagtagttttttccaattctgtggagaaagtcattggtagcttgatggggatggcattgaatctataatttaccttgggcaatatggccattttcatgttattgattcttcctatccgtgagcatggaatgttcttccatttgtttgtgtcctcttttatttcgttgagcagtggtttgtagttctccttgaagaggtccttcacatcccttgcaagttggattcctaggtattttattctctttgaagcaattgtgaatgggagctcactcatgatttggctctctgttattggtgtataagaatgcttgtgatttttgcacattgattttgtaacctgagactttgctgaagttgcttatcagcttgaggagattttgggctgagatgatggggttttctaaatatacaattatgtcatctgtaaacagggacaatttgacttcctcttttcctaattgaataccctttatttctttctcctgcctgattgccctggccagaacttccaacactatgttgaacaagagtggtgagaaagggcatccctgtcttgtgccagttttcaaagggaatgcttccagtttttgcccattcagtatgatatgggctgtgggtttgtcataaatagctcttattattttgagatacatcccatcaatacctaatttattgagagttttagcatgaagcgctgttgaattttgtcaaaggccttttctgcatctattgagataatcgtgtggtttttgtctttggttctgtttatatgctggattacatttattgatttgtatatgttgaaccagccttgcatcccagggatgaagcccacttgatcatggtggataagctttttgatgtgctgctggattcggttttccagtattttgctgaggatttttgcatcgatgttcatcagggatattagtctaaaattctctttttttgttgtgtctctgccaggttttggtatcaggatgatgctggcctcataaaatgagttagggaggattccctctttttctattaattggaatagtttcagaaggaatggtaccatctcctccttgtatctctggtagaattcggctgtgaatccgtctggtcctggactttttttggttggtaggctattaattattgcctcagtttcagagcctgttattggtctattcagggattcaacttctttctggtttagtcttgggaaggtgtatgtgcccaggaatttatccatttcttctagattttctagtttatttgcatagaggtgtttatagtagtctctgatggtagtttgtatttctgtgggatcggtggtgatatcccctttatcattttttattgcatctatttgattcacctctcttttcttctttattagtcttgctagcgatctatgaattttgttgctcttttcaaaaaaccagctcctggattcattgattttttgaagggttttttgtgtctctatctccttcagttcaggtacacctgaagataagaaacagactatgtgaactaaaagatggttgccgcttcacttcggccctccaaatctcccacaagaacctctcttagctgggcgcagtggctcacacctgtaatcccagcactttgggaggccgaggcaggcagatcacttgaggtcaagagatcaagaccatcctggccaacacattgaaaccccgtctctactaaaaataaaaaaattagctgggcatggtggcacgtgcctgtaatcccagctactcaggaggctgaggcaggagaatcgcttgaacccgggaggtggaggttgcagtgagccaagatcacgccactgcactccagtctgggcgacagagtgagactccgtctcaaaaaaaaaaaaagaacctctcttgtgtcccaccctaacaagaaatgtataggtaacgaagtttgtaaaatgtagttcatcctagctgaattcacatattttaaagccactatactagctaaggctaaaagaacagaacagattttttagtcccatcttctccggaagacttccagtcaatgcctaagcaaggtagtatcaaaggcttcgtcattgctgcccaatgggggaattcccttagtaggcaatttttgctccagagctcccccgtcaggctggcagaaatagtactaagaattcattgtgaggtgacacctcccctgctcaatcctgctttttcccattttctttcacaggtgacagtccacaataaattttttgtatttctaactctggcttagcatctgcatctcagaaattccaacaaacataaaataattttaaagcaaacattataactatactcaaggactgcaaatatgcttcaaataagcgaataaatagaaattttcaacagataaatagaaactacaaaaagaatcaaatgaacacgctagaatttaaaaattcaatatctggattttttaaagttcactggataggcttaacaagagatgagaggtgacagagagtcaacaaacttgaagataggtcaatagaaatatcctacctgtcctcacttcggcagtacatatactaaaattggaacgatacagagaggattagcatggccctgcacaaggatgatatgccaattcatgaagcattataaaataatttttaaatttttttaaaaaagaaatagccctgctgaagaatagaaaaataaaaaatggtgaaatttcagtgacctatggagcaatatcaaaagttttaactttgtatcactggagtccttgaaggcaagaaaagattgggacaaaaaagttttctgggttgggcgtgctggctcacgcctatattcctagcactttgggaggccaaggcgcgtagatcacctgaggtcaggagttcgagaccagtctgaccaacatggtgaaacgccatctttactaaaaatataaaaaattagccaagcatggtggtgcatgcctgtaatcccaatctcagctacttgggaggctgaggcaggagaatctcttgaacccaggaggcagaagttgcagtgagccaagatcatgccactgcactccagcttgggcaagaagagtgaaattacatctcaaaaaaaaaaaaagttttgtgaagaaataatggtcaaatttttagtgcaatttataaatttatacagtcaagaaattcaacaaactccaagcaggaaaaaatacaaagaaaaccacatatagatacatcataccaaactgctgaaaaccaaagataaagaaaatatcatggtattagccagagaaaatttacgcaaaacataatggggaacaatgatttgaatgacttctgacttcacgtcagaaatagtagagaacaaaagacaacagaaaaacaactttaagcctaggcaacatggtgaaaccccgcttttacagaaaaaaatacaaaaattagccagcatggtggttcacacctgtagtcccagctgtttgggaggctgaggcagtaggatcacttgagcccaggatgttgaggctgcagtgagccatgatcacaccactgcactccaggctgggtgacaaagtgagaccctatatccaaaaaaaaagaaaagaaaaacaacttaaattgtcaacccagaattctatatccactaaaatatacctgaaaatgaatgtgttgctatgtaacaattaccacaacctagtggtttttaaatttgcacattatctcacagtttctgtagattagaagtcagagccaggaatctgttctcacctggaagctgaactgacaatgaatcgtctcccaagctcactcaggttagtggcagaatttctttctttgagactgtaagactgaggctatgctgagcaactagatgttgcctgaaatttcttgcctggtgggctcagataagtttttgcaagcctccgtgctcacagccagtaagtaaaagagactctagagtcagctagcaagacagagttttttataatgtaccatatcatggcagtggcaacctatcacttttgccatattctattgtttagaagcaattcacaagtcccactcacactcaaggagaggagattatatgaagatgtgaataccagaaggtggggattattgggggtcgctcaagtcctgtccaccacaaggaagatgaaataaaaacattttaaaatgaatgaaaactaagagacttcactcagcagacctgcattacaagaaacactaaatgaagttcatcaaatgaagggaagtgacacagatgggaactcatatatcttcgagaagaagtgaaatccctggtgttttgtgaaaaggccatctatgcaaagcgacacccaaaaacagaaggagccaagaagccaaagaatgaggctgacaaatccagtttgtcagtaggaacttatagacagaagcgtagtcttgggtgacagcaagacaaaaaatctctgcaccgttactccccagacccagggcttttataccatagggcaagagtatatgtgctctatagagacaattaaaggcaccctccagacaggcaaaaatactataggcatcatagcccataatttctgcaataacatcaagatagacctgttgttacactgggaacagtaagtaaagtagaaattttgcaggcattcccaggactggggttaagcagaagtcaacatggaagattaacatccaagatggggtcatttttctctccacatctgaaaatgttaaacatgttgctgagtgatatggtttgggtctgtgtccctgcccaaatctcatgtcaaatcataatccccaatgttggaggaggggactgttggaggtgattggatcatgggggcagacttcccccttgctgttctcatgatagtgaatgagttctcatgagatcatgttgttcaacagtgtgtagcacctgccccttccctctcctccccctgctctggtcatgtaagacgtgcctccttcctctccaccttctaccatgattgtaagtttcctgaggcctctccagccatgcttcctgtgcagcctgcagaactgtgagccaattaaatctgttttctttataaattacccagtgtccagtagttctttatagcagtgttacaacgactaatttagtgaatataaaatattacattctccttaatttctaaatgcttctaactctttaaagtaaaaattataacattgtattgtgggagttttaatgtttttatacattatatatgaaaatacagcataaaggttgggggtaaactgatgtgtatagttgtaaggctcttaaattttgtgtgaagtggtaaaatatttatatctacgtagaatgtagactctaagctaagaatgaatattgtaatcactaagcaaccactttaaaacatagaaagaggtgtagctagaatgccaattaacaaattaaaatggagttccaaaaatttattttaacccataagaaggccaaaaaggatgaagagaggaaaaatgtatatacaaaacaaacaagtaataaaatggtagatctatatcaaattatgtccataattacattatctgtaaatggactaaacactccagcgaaaaagcagagaaggcaggattaaaaaacaataacaaggagaatctatatccaactacaagagatacactttaaatgttacaatacagatagctgaaaggaaagagatgagaaaagatacattatacagcatccaatcagggcataagaaagctagaataagggctaggttaatttcaaatggagtagactttaagacagagataaaaagggacatttcatggtggtaaaatggtccattttcatcaagagaacaaaaatcagaattgcatctaacgatagagcttaaaaatgcatgaaacaaaaattgacaaaacctggactcccagttacaaaatcgcagtgcagaagcaagctggtttcactccccaccccccacagaaaaccaaaaacaaatatatagcaccaagattatcaccagcaatataccataactcaaatatgaggatgagacagttcctgggactacagagaagtgaaaaaactctgagccgacagtcagaggatcagacttccatatccataatgctctgccctccgatctgcccagcaccaaacacatggaaatcttccccctgactcacagcttctacactggaaacactaagattgaggcgtttgatctatttccccaccatcctgcgttctttggcaggagacctgcctctgccccaagtcacaggaagcattgagagtgcctagaaagagaaatgcccctaaggacagtcagagacaaatggcaaaggtgggacttactatccccagcttagaaaactctgctctggacgttggccaaaggagataccaaatcagagtggctgttcatcatcaccacacgggaggaggttcgtttcacaggttccctgttcgcaaacccctggaaagcttcccacgctgccaggctatcccttttggagcctcacccgtttgggaacaggcagcaatctgatttactacaactgaggcaaacttgagcttaaggcgccatctagtgccaaaaaggaggcagtgatctagagggaaaaacaaaagaaacataattaacaggtaaattacaaagactctctaagcaaacatatcccccaaaaaaccaaaacaagccagacagggaagtctggaataaataactaatcctttaatgcagagaaatagacatccatgcacaagaaacaacagcaaacaggcagctgcgtgtggtggagcacacatgcagtcccagctactcaggagcctgagcctgagaccaggagttcaaggccaccttgaactaagaatacattactgcactccagcctgggtgacagaacaagaccctctgtctcaaaaaaaaaaaaaaatctctcctcgccaaaaaaaaaaaaaaaaaaaaaacccaggactagatggattcacagcccaattccaccagatgtgcaaagaagaactagtaccaatcctactgaagctactccaaaaaacggaaggggggaatacaccctaactcattctacaaagttattgtcaccctgataccaaagccaggcaaggacacaacaacaacaaaaaagaaaactacagatcaatatccctgatggacatagacacaaaattccttcacaaaatattagcaaaccaaattcaacagcacatcaaaaagataatgcaccaagagcaagtgggttttattgcaggaatgcgaagatggttcaacatatgcaaatcaataaatgtgactaaccacataaacaggattaaaaacaaaaaccagattattatgtcaataaatacagaaaaagtatttgataagagtcatcagtccttcatgataaaaaccctcaacaaactagacatagaagaaacatacctcaaaataataaaagccatgtaaaacaaacccacagccaacattatactgaatggggaaatgttccctctaagaactgaaacaagacaaggatgcctactttcacactcttattcaacatctggatttcctagccagagcaggcaagagaaataagaggcatcaaaactggaaaataggaaatcaaagtatctgtttgccaatgatatgatcttatgcctagaaaaccctaaagactcctccaagacattcctaggtttgataaatgaattcagtgacgttttaggatacaaaagcaacatataaaagccagtagcatttctatataccaatagtgatcaagcagagaacaaaatcaagaagtcaatcccatttacaataactagaaaacaatactaaggaatattttactaaagaggtgaaatatctctatctctattaaaaaactataaaacactgatgaaagaaattatagatgacacaagcaaatagaaaaaatagcccatgctcatggattggaagaatcagtatcattaaaattaccatactgctcgaagcaatcaacagacttaatgcaattcctatcaaaataccaaggtcatttttcacagaattagaataaacaatgttaaaattcatatgaacccaaaaaagagtccaaatagccaaagcaatcctaagcaacaaataacactgtctgactttaaattatacaaccaggctacagcaaccaaaacagcatggtactggcataaaaatagatacatagaccagtggaacagaaaagagaacccagaaataaagccacatacctaatgataattgatcttcaacagagtcaacaaaaacgtacactgaggaaaggacaccttattccgaaaatggtgctggaaaaattagatagccataagcaggagaatgaaattggtcccatatctctcaccatagacaaaaattaactcaagacagattaaaggcttaaatgtaagacccgaaactataaaaattctagaaggaaacctagaaaaaaattattctggatattggcctaggcaaagaatttataaccaagacctcaaaagcatatgcgacagaaacaaaaatagacaaatggaattatatcaagctaaaaatattctgcacatcaaaagaaacaatcaacagaggctgggcacattggctcacacctgtaatcccagcactttgggaggctgaggtggacagatcatgaggtcaggagttccagaccagcctggccaacatagtgaaaccccgtctctactaaaaatacaaaaattagcagggtgtggtggcatgcacctgtagtcccagctactcaggaggctgaggcaggagaattgcttgaacccgggaggcagaggttgcagtgagccgagaccatgccattgcactctagcctgggtgacaaagagagactctgtctcaaataaaaaattttaaaaaaaagaaaagaaaaagaaacaaccaacagaatggtcaaactatggaatgggagaagttatttgcaaactatgcatccaacaaaggactaatatccagaatctacaaggacctcaaataactcaacagcaacaaaataaccccattaaaaagtgtgtgaaagatatgaacagatactttttaaaagaagacatacaggttgagcacagtggctcatgcctgtaatcccagcactttgggaggccaaggcaggaggatcacttgagcccagaagttcaagaccagcctgagcaacatggccagagcttgtgactacaaaaatagctgggtgtggtgggtgcacacctatggtcccacccatttgggaggctaaggtgggaagatcacttgagcccaggagatcaaggctgcagtgagccatgattgcaacactgcactctagcctgagtgatagagcaagatcttgtctcaaaaaataaattcctagttcggctgaccaagaaaagaaccaaaattatcaatatcgggaatgaaaaaggaaacagtcttacaagtcctatagacattaaaagaataataactgcatattataaataactttatgctaaaaatatattcagaaaacctagataaaataaattccttggaagtacagcttaccaaaagttatataaaataaaatagaaaatctaaatagtccatgtatctcataagaaattgaattcataattctgaaacttcccacacacacacacaaatcttcccacagagaaaattccatgtggtttcaccagtaagttttattaaggcggaattgaggccaagcatggtggctcacgcctgtgatcccaacactttgggaggccaaggcaggtgaatcacctgaggtcgggagttcaagatcagctggccaacatgataaaacctcatctctactaaaaatacaaaaattagccaggggtggtggcacatgtctgtaatcccagctactcgggaggctgagacaggagaattgcttgtagccaggaggtggaggttgcagtgagccaagattgcaccactgcactccagcttgggcaacagagtgagactgtgtctcaccaaaaaaaaaaaaaaaaaaaaaaaaaaaaaaagaaggaattgacacacacactcacaaactcacaaaatggaaagaacacttaacaactcatcttatgaggccagcagaatcctgaggacaaacctaacaaagaaatcacatacacacacacgaaaaaaattccagaccaatattctttttgaacattaatgcaaaactccttcacaaaatatcacaaatagaatccagcaatatttaaaaaaaaaaaagaaagaaagaaacatgaccaaattggacatatctcaggaatccaaggttgatttaactcacaaaaagccaaacaatgtaatcagccatattaacagtctgaaacaaaaattactcattgaaataaagcaggaaaaccatttaaaaaaaaaacagccagttattcaaaaacaaaacaaaaaaggaaataacttttagcaaaccagaattaaaagggaacttctgcaatctaattaatgacatcttcaaaaagcctacagttaacactatacttagtagtttaattttttttttttaattaagacaggatctggctctgccacccaggctggagtgcagtggcgcaatcacagctcactgcagcctcaacctcctaggctagagtgatcctcccacctctgcctcccaagcagctaggactataggcatgtgccaccacacccagttaatttttttattttttgtagagacagggtttcgttattttgtccaggctggtctcaaactcctgggctcaagcgatcctcccacctgggcctctcaaagtgctgggattacaggtgtgagccaccacgcccagcagtagttgaatattgaatagttcccctctaagattgggaagaaggcaagaatatccattttcaccacttctgttcaacatggtatcacagattctagcccgtgaggtaaggcaagtaaagaagtaaatggcattgggattggaaagaaagaagtaaattatctttattcacaagtgaaattattgtttacatagaaaatcttaaggaatctataaaacatctgctggaactaatacgtaaactagcaaacttgtagacacaaaggcaatacaccaaaatcaattgtatttttctgttctggcagtgaaacattagaaaatggaattagaaaaccaattttatttactggaatgccaaaaacatgaaatacttaggaataaatttaacaaaagacattgcctttacatttaaaacctcttcattaaaaatgtctacattaaaaagcacacaatcttactgagagaaatttttaaagggctgaataaatggagagataaaccaaacgcactgattggaatattcaatgcttttaagacgtcaattagtcccaaaattgatctatacatttaatgtcatcccaaccgtaatccaatctgaccattttatggaatttgacaaactcgttctaaaatgtatataaaaatacaaagacctggaagtatccaaagtaatcttgaaaaagacaaatttggaggactactagaactggatttaaagacttgtgatgaagctacagtaatcaaggcattgtggttactgtcataaggatagataaatagatcaatggactagaacagagaatccagatgtagatcctcatttatagggtgatttatttatttttttataaaaacaccaaagcaatccaataaagaaaggaaatgtttttaggctgggtgcagtggctcacccctgtaatcccagcactttgggaggtcgaggctgggagatcatttgaggtcaggagttcgagaccagcctggccaatatgatgaaacccccatctctactaaaaatacaaaaattagccaggcatggtggcaggcacctatagtcccagctactcagaaggctgaggcagaagaatcgcttgaacccgggaggtggaggttgcggagctgagatcatgccactgtactgcagcctggacaacagagcaagactccgtctcagaaaaaaaaaagaaggaaggaaggaaggagagagagaaaaaaagaaagagagagagggatggaaggaaggaaggaaggaaggaaggaaggaaggaaggaaaagaggagaaagaaaggaaatgttttcaacaaatagtctgagaaaactggagattcaatatggaaaaaaaaaaagtgaccctctgcctacaagaaaagataggaaacttccttctcaacttggagaccaggcttcttaagcaggtttcttaggcagtactgagaaagcaataaccataaaagaaaaagtgtataaagtgtataaagtcattttatcaaaatgtgaaacttcagtttgtcaaaagacatctttaagagaatgaataggctgggtgcggtggcctgtaatcccagcactttgggaggctgaggcaggtggatcatctgaggtcaggaggtcaagaccagcctggccaacatggttaaaccccatctctacaaaaatacaaaaaattagctgggcgtggtggcgggtgcctgtaaccccagctacctgggaggctgaagcaggagaatcacttgtacctgggaggtggaggttgcagtgagccgcgatcgcaccattgcactccagcctgggtgacaagagtgaaactctgcctcaaaaaaaaaaaaaaaaaaaagaaaatgaatatgtcattctcagactaagaaaaaaattcacaaaacatatatatctgacaaaatgtcagtattcagaatatatttaaacacacacacacacaaacacacttctacaactcatttaaagaaagaaaaaaaaggaaagtggtgtcagtaagatggctgcctgcagaccctgctgttcaccctcccacaagacccgaccaaggcaagcaatacgcagatcagatttgactggagtgtggagggagagggctggagtgcagcaggggagtggagctgcagctgcggtgactgcaaggccaggagggctggacctccagcatgaaggcacctggcctctgcaaccccgcctcccccatctggatctgatctgtccagagtcagaaaggacatctcactgcaggggaaaaagtaagcagaagaaccccctcggaacccccattgcaactacaaacaccttcagtcctcactgctggagaatcccagagtcctcgagggccctgagtccagtgtggagagctacaggaggtcacacagccacactgccctggatccggagcacagttgcacactacccatccccatctaccccctcgagccaagctactgcagcacagccccatcttgagaccagagccatttctagagtgcaccctgctctgagggccagtagccactacccctctccagcaccgggcttcagcattccaccaagcccacgcgggtggctgctgatgcaagcgcagtaacataaagcctgggggcaggactggctgtgactggccctgcacagcagggaaaccaactcctgtgaccctcacctccagcaggaggaacagtctggaagtcctgcccagggcaaacctgcccttgagccagccaaactgctgcgtgcccaagcaggagaggccctcaagcctccaaacagctgaaacactcctgggctggcagagcagctatgtgcctgtgcccaagtcccgagaaactgtctgcaatgctcaatcccctacagacaagcccctggcctgcccagtggccctgcacccacaatcaaggcctgaaaaacatccctgcaggctacctctggcagacactcccctaggccagccaagcaactgtgtgcccatgccctgcaactgagaaacaaccctacaggtgatccctgttggacaaaaccccaggctggccaaaccgccatgagcccatatcccaggcctgagaaacagccccatgggcttcccccagcacacatgccccaggccagccaagcaactgtgtgaccataactaggtccaagaaacagctatatgggcagccccggtgggcaccctccaggccaactgagtagccttgtggctgcatcccaggcctgagaaacagccccacagtctgcccctggcatgcatgcccccaagcctgcagagcagctgtaagcctgtgtcctgggcctgagaaacagccctgcagactgctcctggcaggcacagccccaggccggccatgcaaccacatgcacacattcccaactagagtaatagcctcttagcgccaaccccagcctcacgtttgccaacacacaatgtgcatgcatgcacctctgacctgaagaagcagcctggcaaggctacccccggtaaagccacaccactgccaccacagcctctgttagcctaagccactgagacacttggaaatgtcactagagtggcttatagctgaagaaactacatggaaactacagtactttgtattttatttatttatttatttgtttgtttgttttttatttttgagacgggatcttgctgtgttgcccagtctggagtgcagtggtgtgatctcggctcactgcaacctctgcctcccgggttcaagcgattctcccgcctcagcctccccagtagctgggactacaggtgcccgccaccatgcccagctaatttttgctggaaactacaatactgcagccccctaaaaccaaagccagtactctccaccaaaacaacaccccatgtatattttttgtaagtgttgtgactttataatacacagataatatttaaccttccccaccccagtcatttttttctcatatatttcaaggtctttctctcacaatgatccttccagataaacttttttttttttgagatagggtcttgctctcttgcccagcctgaagtgcaatggcacaatctcagctcactgcagctttgaactcctaggcccaagcaatcttctcacctcagcctcctgagtagctgggactataggcacatgccaccatgcctggctaattttttttaattttaatagtttttggggtacaggtggcttttggttatatggatgaattctttagtggtgaatggtgagatcttagtgcactcatcaccagaacagtgaacaccatacccaacatgtagtctttcacccaccttccagtctccccgactgagtccccagagtccattatatcactctgtatgtctttgcatcctcatagcttagctcccacttataagtaagaacatacagtatttggttttccatttcagagttactttgaataatggcccccagctccatccaagttgctgcaaaatgcattattttgctccttattatggctgagtggtattttatactgtatatgtaacattttctttattcactccttcctcggtgggtacctaggttgattccacatctttgctattgcaaattgtgctgctacaaacatgtgtgcatgtgtctttttcatataatgacttcttttcctttacatgccatgtatattaacaacactttccctataaaacctactccctaaaattggaagaagcaacttttccatcaaatgcatagaaatcaatgtagggacacatcaaacatgaacaatcaaggactcatggcacctccaaaggaacacagtagctctccagtaacagtccccaatcataaggaaatataaaaaatgccagaaaaagaattcaaaataataatctgaagaaaattcaatgagatacgatagaatacagatatacaattcaatgagatcaagaaaacaattcatggtctgaatgagaaattcaacaaagagatagatatcataaaaaagaacctaacagatattctacagctgaagaacttaatgaatgaaataaaaaatatatttgagagcttcaacaacacaccagaccaaacagaagaaagaatttctgagctttaagacaggtcatttgaaataatacaggcagaccaaaagaaagaaaaagagaaaaggaaggaaggaaggaaggaaggaggagaaggaaggaagaaagaaagaaaaataaagagggagagggagagacagagaaagaaagagaaagaaagaaagaagagacagaaaagaaggagaaaaaaagggagggggagagagaggaaagaaaagaaagaaaggaaagaaagaaagaaggaaagagagagaaagaaaggaaggaaggaggaagggagggaggggaagaaaggcagaaacaaaggaaagaaaaagaaagaaggagagggagagacaaagaaagagagaaaaagaaagagaggggagagagaaaagaaagaaagatgaaaagaaaggggggagagagaggaaagagaaaaaaaagaaagagagagagagagaggcagggagggaggaaggaaggaaggaaggaaggaagaaagaaagaaagaaagaaagaaagaaagaaagaaagaaagaaagaaaaaagagaagagaaaaaagaaaagaataattaaaaagtggctgggtgctatggctcacacccacaatccagcactttgggaggccaagataggaggaccacttgagtccaggagtttgagaccagcctgggaagcatagtaaggccccatctctaccaataaaagggttttttttaattggcttggcatgttggtgcatgcctgtaatattggctccttgggaggctaatgcaggaggatcacctgagacaaggaagtcaaggctgcagtgagccacagtcatggcactgcattcctgcctggacaacagagcaagactttgtctcaaggaaaaaaaaatgaagaaagcctacacaacttatgtgacattattaagtaaagaaatactcacattatgggtattccagaaggagaagataagggaaaaggtttagaaagcatatttaataaaataatagctgaaaactcaagtctttggaaagagatggacatccaagaagatcaaataaccctaaatggattcaacccaaacaggtcctctctaaggcacattatactcaaattgtcaaaagtcaaaaacaaagaaagacttctaaaagcagcaagagaaaagcattaagtcatatataaaggaatctctattagactaacagtggatttctcagcagaaaccttacaggtcatgagagaatgggatgatatatttaaagtacggaaagaaggccaggcatggttgctcacacctgtaagcacagtattttaggaggccaaggcaggcagattgcttcagcccatgagttcaagagcagtccgggcaacatagcaagactccatctctacaaaaatagaaaaattagccaggcatggtggtatatgcctgtagtcccagctactcaggaggctgaggtggaaggatcacctgagcctgagggggctgaggctgcagtgagctgtgatcacaccactgcactccagcctgggtgacagagtgagaccctgttcaaaaaaaaaaaatagtactgaagaaaaaaaaaaaaaaaaaactaccaagccagaatattatacccagcaaagctatccttcaaaaatgaaggaaaaataaaatctttcacacacaagcaaaaactaataggccttacaagaaatactcaaaggagttttacacctggaagtgaaaagacaacaggcatcatcatgaaagcatgtaaaactataaaacccattgttaagagctgatgcacaaaggagaaagagaaaatcatcaaaccttatcaaacaaactatgcaaaacgactcaaacacaaaaataatgagaggaagtaaggaacaaacaatagataaaacaacaaggaaacaatcaataaaatgacaggaataagtcctcacctatcaatgataactttgaatgtaaataaactaaattccccccatttaaagatatagactgaatggatttaaaaaaaaaaaaagaccaactacacattacctataagaatctcgccttacctgtaaagacacacataggctgaaactgaagagacgaaaaaagatattccaagcaaaccaaaaccaaaagcaagcaggagtagctatgcttacgatatggtttggctgtgtccccacccaaatctcatcttgaattgtaactcccacaattctcacatgttgtgggaggaacctggtgggaggtaattgaatcatgggggcaggtctttcccgtgctgtttttgtgatagtgaataagtgtcatgaggtctgatggttttaaaaacgggagtttccatgcacaagctctctctttgcctgctgccatccatgtaagacatgaattgctcctccttgccttccgccatgattgtcaggcttccctagccacgtggaactataagtccattaaacctctttcttttgtaaatttcccagtcttgggtatgtctttatcagcagcgtgaaaacggactaatgcaactatgtcaaacaaaacagacttcaagtaaaaagctgtaaaaggagacaaggaaattatataataataaagggattaattcagccagagaatataacaattgtaaatatatatgcacccaacaccagagcacccagatatataaggcaaatattagatccaaagggagaaatggaccccgatacagtaatacctgggaacttcaatgtcccactgtcagcattggccagatcatgtggacagaaaatcaacaaagaaacatctaatttaaactgtaacacaggccaggcatggtggctcatgcctgtaatcccagcactttgggaggctgaggcaggcggatcacttgaggtcaggagtttgagaccagccgggccaacatggtaaaaccctatctctactaaaaatacaaaaatcagccaggtgtggtggcatacacctgtagtccctgctacttgggaggctgaggtgggagaatcgcttgaaactgggaggcggaggttgcagtgaactgaggttgtgccactgcactccagcctaggtgacagagcgagactctgcctcaaaaataaaaataaacaaaaaataaataaactgcatcatagaccaaatggacttaacagacattttacccaacatatgcagaatacacattctgtttatcagcacatgaaacattctccatgactgaccatacattaggacataaaacaagtctcaaaaaaaactttttagctgaaattctactaagcattttatctgaccacaatgaaataaaactggatatcaataacgagaggaacatttaaaaccatacaaatgaatggaagtcaaacaacatgctcccgaatgaccaatgggtgatgacagaaattaataatgaaatttaataggtcaggcatgatggcttacacctgtaatcccagtcctttgggaggccaaggcaggaggactgcttgagctcaggagtataagaccagcctgggcaacatgatgaaatcctgtctctactaaaaatacaaaaagtagccacttgggcccaggaagcagaggttgcagtatgttgagatggcgccactgcactccagcctgggtgacagaacgtgaccctgtctgccccccactcctccaaaaaaaggatgaaatcctgtcattcgcagcaacatggatggaactggagaatattatgttaaatgaaataagccaggggaacagaaggttaaacactgcatgttctcactcatatgtggaagctttaaaaaaaaaaaaaagtttatctcatagaagtaaaaagtagaacagagaatactcgagattgggaaggatgggggaaggtggggttagggagatatttgttaaaggatacaaaattacagctagataggaggagtaagttctaatgctctacagcactgtaggatgactgtaattagcaataatactgtatatagtttcacacagctagaaggaggatagtgaatgttccaacacaaagaaatgacaaacgtttgagatgatggatgtgctaattaccctgatctgatcactatatattatatgtatcacaacaccgctatgtactcatatatatgcacaattattatgtgtcactttaaaaaatgtttttaactgttttcctctatgggctgcttagctctacagatatacaccaggagtcttcaatctaagctaactgggaaggggaacagggaacaggaaacagggagaagaaacggtctgatgaaactcaccttcccatcatttggcagccagaagaagaggagcaggtggagactgtaatggggactgctagtattgccttttctgtctttttgttattgatcctattggccaaattaggtacacacaggtatcagcattgctgcttttcttctgatccttgcaggaaagtcagatgtccgtctcaaactgagcatcatcctaaactgcgtgttccctgtcatgattgttcaagttgtttacttctacttaggagtcttctattgaagtgccagggctagtgactcctgggatatcgggcagatggcagggctgtgtgtgagccatgggagaactgcaatgatccaacagaaacttttgatcataaatgattcaagatccctggggtgtggtgaagagcatcctccgggcatggtgcaatagccatgaggtagctgcacatgtcgctgatgggcacagtgtgggtggggatggcacagcactggctgggctggtgactgctgccagcagacaaggacttggctctgggtgcaggcactccgcttcatcctgaggacaggctgtggcggctgcagagctgggctgctccacctcctcaggcaggaggaaggctaaaaatgttttgtgttttttgtggttttattgttgtggttgttgttgttgttgtttttgatacagagtcttactctgttgcccacgctggagtgcagtagcatgatctgggctcactacagtcttgacttcccgggctcaagcaatcctcacacctcagcctcccaggtagtcgggactacaagcgtgcaccatcacacctcgctaatttttctattttttgtagagacagggtttcaccatgttgcccaggctggtcttgaactcctgggctcaagcaatcctctcacctcagtctttcaaagtgctgggattataggtgtgagccaccatgcccagcctggtcttttttaatttaattttgctttattaaggttttttttaggctaggcacagtggctcacacctgtaatcccaacattttgggagactgaggcgggcagatcacctgaggtcaggagtttgagaccagcctggccaacatggtgaaatcatatctctactaaaaacatgaaaattagctgggcgtggtggtgggcgcctgtaatcccagccactcaggaggctgagacagcagaatcttttgtgtccaggaggtggacattgcagtgagccaagactgtgctactgcactccagcctgggcgacagagcaagaccccatctcaaaaaagatcagcccattaaaaatgagtaaaagaccttaacgaacactttacacaagaaaatgcggaaatggcccttatgcacatgaaaaaagcttcatccttcattagtcaccagggaaaaacaaattaaaatcacattgggatacctctacatatttaccaaatggctacatttaaaaactaacaacatcaattattgttaagaatgtagtgtaactagaactcacacattgttgaggggagtgtaaaatggtacaatcactttaggaaaaaaatctgacggtgtcataaaactaaacatacacctggcctgtgacctgcaattctactcctagatatttactcaagagaaaggaaaacatgcccacaaaaaggctagcatgcaagtgttcatagcagctttattcgtaataatcaaaagccaaaaacagatcagaagaatggataaacacactgtggtgtattcataaaatagaatatggttgagcactaaaaagccacaaacaacaatatgaataaacctcaaaaacattacacgtagtcaaagagccttactaaaaagcatatatggccgggcgcagtggctcatgcctgtaatcccagcactttgggaggccaaggtgggcagatcacctgagatcaggagtttgagaccagcctggccaacatggcaaaaccccgtctctactaaaaatacaaaaattagccaggcgtggtggcaggcacctgtaatcccagctactcaggaggctgaggcagggagaatcgcttgaacccgggaggcggaggttgcagtgagccaagatcgcgccattgcactccagccttggcgacagagcaagactctgtctcaaaaaaaaaaaaaaaaaaaaaaaaaaaaaaaaaaaagcatatacactatacgatttcatttacatgaaattccagaacagcaaaattaatatatcatgaaaaaatcagaacagtggttgctttggggagtggggtagggatcgattgaggagaggcttgagagaactttctggagttgatgttactgtcctataacttaactgggatttgggactcgtaagtgtttgcctttgtccgagcttgttgaaaggtacacttaagatttgtgcaattcactttatataaattatatctgaaaaatacctgtaaacaaatgttgagctgaagttatgcaggtcaaggtgtttagaggtagaatatgctgatgtctacaacttacactgaaatgtgccaaaaaataagatggattgataagtgaaaagatgaatggctagataaatggatagatgattaagcaaagacagcaaggtgataagtatatcagtgttaaaatgtgcgattctttcaacttatccatatatttgaaagtttctataataaaactgtaggggaaaatatatatatactcttcaacccagaaattttactcctgggaatttatcccatagaaataaaagtatttgtctataataacacgtgtgagaacatttattgcaatgctgttcctagtgaccaagaactggaaccaaagtgcatatccatgaaatgggggtggatatgagtactcacctgagtagagcgtggcacgtccacaccatgggctagaacgtggccgctaaaaggagtaagtcagagcctctccagagagtttaaagggatttcactgaggaacggttgagggagaaaagcaagagtgaataatataatcctatttttgtaaaacaatcacacacaccacacatacactctctctctcttgttctctctctctggatagaattatatatatttaaaaaaatggaagaacacagattgctaacacagcttatgggtaaaggcaaaaaataaagggttgagtgttgttatgggggtaagggggaatatccatgatttaaaaaacagcacgtatatcatctcctttaagttaaattttctggccagacacactcaggagttcaagacgagcctggacaacatagcgagaccctagtctcaacaacaacaaaaaattagtttggtgtcgtggtgcatgcctctagtcctagctacttggaaagctgagatgggaggatggcttgagcccaggaatttgaggcttcagtgagctgtgattgcaccactgcactccagcctgggcaacagagcaagaccctgtctctttaaaagataaataaataaaattaaaataagttaaattttctgtagtatgcagcgtgtggtgcttaaagagatgcacatgaaggctgggcaccaaaatgttaataatggtcatctcatggtggtaggattccaggtaattatttccttgtctttgtaggaaggaagggagaaagggagggagggagagagggaggaagaaaacaagtctacaggtctcatatccttacctcctattatctcttcaacccaccccaactcctactgggtttttttgttttttgttttgagacaggatctcactctgttgtccatactggagtgcagtggtgccatcacaagtcaccgcatcctccatctcccagactcaagccatcctcccacctcagcctcccaagtagctgggaccacaggcatgtgacactgcgcctcaatattttttttattttttgtagagacgaggtctcaatatgttgcccaggctggtctagaactcctggcctcaactcccaattcctacttttgccagaccctaatcttatctgacctctcaccagcatttcgcattgttggcagatgtctccttgaaatactcccttcaatcaacttccatggcaccctgctcccaaatcctgcctctgcgatcatcacttctcagtcctctttccatccctcccatcatcttcctctggattttgtcctcaaacctgtccttttctcagtttaattaccatctagatgctaatgtctcccaagctgctgtcttgaactccaaccaaacatctctaattggatgtcccacaggtcatcagacccagcatggccaaaactaatctcatcatctttcccccaaaagctactgcttcttctcctgcagtccaatctcagagaatgtcagcatcgccacccaccacttgctaaagccataatcttggatatcattactctctcctactcccacatccagtcgctcaccaggtgctgtcagttctgtctcccaagtctctatccatccatcctcttgtctgcatctcccctacccctgctttgatttgggcaccattacatctcttgtaaatgactgaagcagcctgttcattcatctttctgtccactgcccccatttatctcccatagatgccagagagatttttctaaaccacagatctgacctcatcacttccctgtttaaacctctttgaggatttcccattgctcttaagatcaaggtcaaactcttagaaagagaaagaaagaaagaaagaaagagagagagagagaaagaaggaaggaaggaaggaaggaaggaaggaaggaaggaaggaaggaaggaaggaaggaaggaaagaaaaaaaaaaagaaagaaagaggccgggcgcggtggctcacgcctgtaatcccagcactttgggaggccgaggagggcagatcacgaggtcaggagatccagaccatcctggctaacacggtgaaaccccgtctctactaaaaatacaaaaaattagctgggcatcatggtgggtgcctgtagtcccagctactcgggaggctgaggcaggagaatggcgtgaacccgggaggcggagcttgcagtgagcggagatcgcgccgctgcactccagcctgggcgacagagcacgagtccgtctcaaaaaaagaaaaaaaagaaagaaaagaaaagaaattggccgggcttggtggctcacgcctgtaatcccaaaactttgggaggccgaggtgggcagatcacctgaggtcaggaatttgagaccagcctgaccaacatggagaaaccccgtctctactaaaaatataaaaaattagccgggcgtggtggcgggtgtctgtaatcccagctactcaggaggctgaggcaggagaatctcctgaacccgggaagctgaggttgcagtgagccgagactgcatcactgcattccagctgggagacagaaagactccatctcaaaaaaaaaacaaaacaaatatatatataactttttttttgacagggactccctctgtcgcacagactggagtgcagtggtgctatcacagctcaccgcagcctccatctcccggcctcaaatgatcctcctgcctcagcctcctgagtagctggaaccacaggcacaggccaccccacccagctaattttctgttttgtttttagtagagatgaggtttcactacgttgcccaggctggtctcaaactcctggcctaaagcaatcctcccatctcagcctaccaaggtgctaggatgatagacatgacccactgcaccaggccaagatcaaacccttaaacatgacacattggtttaaagatatgctcagcctcccccagcacatgccatctccagcccctggcctctctctttaccacaaatctaagaagcaagaacactgctgtgggccctcttcaagggctaggggcgctggaacatttggcagaggtgaggatgccttttcctttttggaaaactactttccaggtggctgaagaagtgagagggctgaggttgcttcccctagggcgacagccttccatctcccactcatccctctgactctattattctcaagaggttggggcaatgagctgggtggagatgactgaccacagagaagaaaagcccagagcggggataaagcccacttttcttttgctttagggagaaggttctgcactgatccacattcgcagtgccctcccttttttttaattttttttttttggagacggagtttcgctctcgttgctggagtgcaacggtgcgatcttagctcaccacaacctccgcctccctgtgattctcctgctcagcctcccgagtagctgggattacaggcatgtaccaccacgcccagctaattttgtatttttagtagagatggggtttctccatgttagtcagaacggtctggaactcccaacctcaggtgatccacctgcctcggcctcccaaagtgctgggattataggcatgagccaccgtgcccagccacccttctttttttgttttttttttagagacagtcttgctatgtcacccaggttggagtacaatggctccatcatagctcattgcagcctctaactcttgcacttaagcgatcctcccctatcagcctcctgagtagctgggactagaggtgcatgccactgcacccagctctccattctaattattaataccttgatatagagctcaggaccaaggcgggagggctcctctgctactgactgtcctccatacatacacagcatagcactgggcacaataactctttattttaatctttatcagtggagtctacagtacactgttcccctcggcttcaagctcccaagccagaaggtgagtcttactaaagaaaaaattactcacgacacttgttaaagacaataaggcaaacttttttgaagaggagacatgactgtaagtatagggaccactggaatggggtcctgcagcgagggagagagactggactcaactctgactgcaaccagttcaagtagagatttatcgccaaggagcagggagaggagctcaacagaatttttgctgaaggcaggccagggtgataagatactgaaggtggggagtttttgctaaactgacttagcaggattcttgctcacattggattctatgaggatagagagaagctcaagctcagggctagatgagcagagggctcagaggagcccagtgatagttttggtctaagaagagagtctttgtcagcctcaataggcagaacttaactaagtagggagaaaggagaatgtgaggctgcaggctggtcagagggcaccctctggtcagggtgccccattaaagtagccaaacactggctttggggtccacctatgggttttaagtcctaggcctgaagtaagaggcaggacttgactctggaggcagggctcggacaccaggcagaattgagcactagctaaaacagggatggggtggaagcagctttccttaagacacacccaccagggtgccatgtttaccgttgccatggcaacacctgaaagttaccaccctttgccatggcaatgacccagcgagccaaaagttactaccccttccctagaaatttctgtataaaccgcccattcacctacatgtgattaaaaatagctataaatataactgcaaaactgccctgagctgctactctttgcatatacggtagccctgctgtgcaggagcagtcacggagctgtaatcagccctgcacattactcactctgtaaccttaggcctcagtctccccatgggtgaagacaaggagacagagggggctagagttcctgtgtgtactcagggttctaggcgctggtgcccgctttccagaaggtcccagctggaatgtttcctaaaaaacaagagccaaatgtctcttgcttcacttcggcaactttcacatttacatataaattgatacctaatggttctgccctcctttatcttagccccaggttctaatgagctggaaaaatggtcctgtgcctgggaataacagagcttccaggctaagggtgggagagaataagtttcttcgcttgctgtgccatggggaaggcagagagggcaggggtgaagggaataccatgtcccttctccactgggacctatgccacagtgtcctaaagtaggggaaaaaagcgttttgtaacagtatgaaacatggtggaaaatcaagcctgaaagtatgtgaaatccactacacattttgtgaaaagtgactcataattctatttgttctttccggtgtacacattacagatatttcatccagacagaaactggaaataaagataagccaggagcgccatctgggacgtgatctgtcactaaggctaaggcttaaccgctcaaatccagagatctctgcagataccggggatggggagaaaagtgataaagtccctcccccaaaacacgcacaaacacacacacaaacacacacacacataaacacacacacaaacacacacacacacacacaaacacacactctactggtgccaggtccctcttaaagcgctttaaatacatccgcttatttaattccaacaacctgtgaagttaagagtcccattttagagactgaggaaactaagacttgctcacctaagtgactggcagacttgggcttcaaacccaggcctgtctgatcctaaaagcccaggttaatttacacaataccactacagcactagagcttgtctttcttttcttctttctttctctttctttatttctctttctcccttccttcctttttttttgtagagacagggtttcactatgttgcctagggtggtcttcttaaactcctgaactcaagtgatcctcccacctcagcctccctaagttctgattgtacagacatgagccactgtgcaaggcctaaagcagaagttcttaactgaggtccatggacagaattcagggagtccgtggatgaaaaacgaaactatatctttattttttcctatttctaactcaaatttaacatttccttcaaatctgaaagggggcaacaaaccaatatcattaactttgcctccagtggaaatcactgattttcatatcatattacagttgttgatatctcaaaatatcatttatggtcatcaatatttcaaaatatcagtagttaactgactcaccacaagatcttgtcatttagtgcattaataaagaaacactatggtagccaggtagctcccagaaaataaagccctgctatgtagcatttgccaattcccatggtgtaaatactcctacaattgcccatttcaaggatggctatgtttaacaactggtttgcaaatttcctgaaaatttagcaatcaatgtttggaagcacagacaagacagcttcagcacaccatgggcactagagtgaatttttctggatctgccagaattccctgcaagtcctgcagccttcaatgtaatgacattggtaataatggtaatagattttaaatattgattaaatccttcttctgttcaaagcataataataagcacttaacatgacctatctcatttaaactaccaataatccaataaggcaggtattattggagtggtttaaaatgggggaaagaggaaaggaaaagttgtggttttgccccctggcgatgtctggcaatgtctggagacattcttgattgtcctaactgggtttgctactggcatctagtgggtagatgctgccaaacatccttcaatgtacaggacacacacactacctgagaaagaattatccagcccaaaatgtcagtagaactggggttgagaaattctttattactgttattccctttttaaaaattggaaaattgccacccattgagattaagttgtccaagttcacacagttttcatagagtcagttatgagtgaagactagttcttactccctgactctcccttaccagatgtaggaagagttgcttattacaaaggaagcaggctgggcacagtggttcacgcctgtaatcccagcactctgggaagctgaggcgggcagatcacttaggtcaggagttcaagaccagcctggccaacgtggcaaaacttcatctccactaaaaatacaaaaattagccaaatatggtggcatgagcctgtaatcccagctacttgggaggctgaggcaggagaatcacttgaacctgaaaggcagaggttgcagtgagccaagatcatgccattgcactccagcctgggcaacagagcgagactctgtctcaaaaaaaaaaaaaagaagaagaagaagaaagaaagacaggaaggagggaaggaaggaaggaaggagggaaggaaggaaggaaggagaaaagagagaaaaacaaaaagaaagaaagaaaaaagaaaggaaggaaggaaagaaagaaagagagaaagaaaaaaggaaaggaaaaaaggaggggaagggaataaggaggaaggaaggaacgaacgaaggaaggaaggatagagagagaagaaggaaaaagaaagaaagaaggaaggaagggaggaaagaaaggaggggaagggaagaaggaaggaaggagaaagaaaaagaaagaaagagcgagaaagaaagaagggagggaggaaggaaggaaggaaggtaggtgcctgctgggctggccatggcaatgtgagtccaggattggtctcaaggaggctcaggcatcacatgttgaaagatccaaccccagctgcttctaaagagtgagaaggggatgacagtgacactctgtctctaaataaataaataaataaataagtgaggggatttggccccagaaattattctcaaagtgagtcaatctgatggcccattgggctgtctgcaaaattcatttaggacaataaaatgaaaaggaacatggagatcactcattgcataaatacttattaagaacatactctgtgcctgcactcttctaggtggtggtggagtagtgaacagaagcaaaatagctcttgccctcatggagtgtacaagctggtgggggagtagaaaagcaaatgaagaagtgggttagaaaaagtacagttgtgatagatgctgtgaaggaaggaagtgcgtgaagtgctatagtaaataatctccgtagggtcctctttagagaggatagtcaggaagacttccctgaagaagggatatgtgagctaagatctgaaggatgcaaagccagccatgggaagagaagagaacaggcatcgacacagtgggaccagcagggcaggtgatgaggctctgagcagaataagtttgctgttttctagtcaccaaaaggaggttattgtggcctggttcactggctcatgcgtgtaatctcagcactctgggagcccagtgtgggaggattgcttgaggccaggggtttgagaccagcctgggcaacagagtgagacctcccacctctacaaaaaaggtaaaaattagccgtgcatggtggtatgtgcctgtagtcccagctactcaggaggctgaggagagaggattgcttgagcttgagttcaaggctgcagtgagctaggatcgagccactgctctccagcctgggcaacagagtaagaccccatctcaaaaaaaataaaataaaaagagagagagagagagattattgtgactggagcacaaggacagagggaaggggcaattcaggaccaaggtaaagaggtcagcagagaccatgccacactgagctttatagcactatgttccactcatctgcctgcgctcaggactcaaaataggtgtgacaaaaaggaagccccaggctataagggctgggcaggtgagtgtctaaggagggtgtattagtctgttctcacgctgctaataaagacatacctggccaggagcggtggctcacgcctgtcatcccagcactttgggaggccgaggtgggcagatcacttgaggtcaggagttcgagaccagcctggccaatatggtgaaaccccgtttctgctaaaaataaaaaaaaaatgaagacatatctgagactgggtaacttataaatgaaagaagtttaattgactcacagttccacatggctggggaggcctcacaatcatggcagaaggccaatgaagaataaagtcaggtctcacatggtggcaggcaatagagcttgcgcaggggaactcccatttataaaactatcagatctcatgagacttattcactatcaagagaacagtatgggggaaaccacccccatgattcaatcatctccacctggccctgcccttgacatgtggggattattacaattcaaggtgagatttgggtagggacacagccaaaccatatcagtgggtggtggggaggggtacttgtaggtacctagagggacttctagtctctcccgtgctcccacactcacctcccttaacccgtcacctctactgacccaagattcccaaatgccaggatccaagatgtgagtgtgtgtatgtatgtgtacaacaatgatgaagatcagatggcattggagaaatcctcagcacatgggactggaggaccaacatgcctggctctgtgctgagaatgtcacactaataattagtcatttgattagcagctgcccacttaaccactgcactgttcaacaacagtccaatggactggtgccctagagctggattaactttgcagagtgggtgaacaaactaagctctgctcagggaagcccagaattccagaacagtgagactcatctcagaaagcagagaatggcagaaggtggagaaagaggggaggaaacagaccctgagtaaattcactgtgccagctgctacgtgaagcttcactatacatgcattatctcatttcatccttccaacaatacacttcgggggtacccttttccctattctccactcggaaactgtattagatccagtcaagtccaggattggaatccaggtctcccttttccttggtgaagtgcccacccaatgtctggatttcaccgtcagtgattcaaggaacttctttatctattcagaattaaagaagtgagccgaggagccactggtgtgcccaagacaaagatggcctctgaaaggagagaaaatatagccccgatgaggggaggaaatgctaaacagaatttgccagaactctccagaaataatgaatgcccaggagaagagcaaaggtattgagaacttggggaaccatttgactgtgtaaagggggtaatatttttgaaactatcaaatagatccatctacttttcatccctgtgagtcatgatgctctgaatctcttctttccaccacccccagccccattaaatcaagaggaatgccgaccccacctgaaataaagaggccatcctttagctttgagtctgtacagaggccatagtcttaaaacctagcctggtggggaatacggagaggttcttaatttcaaaaacttccctttccatgcaaaggcaaatctgggaggtctgagctctggtatatattataagcagtcattagatggcattcagtaaaagagctcagaagaaggtgatctcttccaagcccagaagtggaaccaagaaggcagggagattcagagaaaatgcaaccaagagaaagacgttgcctggaacgctcagggattcagtgccccgacctccctcagcccttgccccagtatgggatggaaagaaaataggaatccagggctgggctcagtggctcacacctgtaatcccagcactttgagaggccgaggcgggaggatcacttgaggttgggagttcaagaccagcctgcccaacatgtgaaaccccatctctacaaaaaatataaaaattagccaggcatggcggtgcacacctttagtcccagctactcaggaggctgaggcaggagggtcgctttaaccagggaggtggagactgcagtgagccgagatcatgccactgcactccagcctaagcaacagagcaagattcagtctcgaaaaaacgaaaatagaaatcccagaaggtgagaggaaaaggagaaatcagaaagggtttttcttcattgaagctctgagactgtgcctctgggtgaccaaggagcagccaagatagcagagagatggtcgtagccttggaggatccatcaggggcagtcacaaaaacagagcctctacaagcactgtgggaatcagatttcatattggaacaagaactcacgcagatgtgggataacttagaggtggaaatcagagggccagacaaagagccactatcatgtctgctggagccactgatgtgagtggacacaccacagcttgcagggagaatccaagaagctcttcctgtctgcccaaaggaggccatgaatgaggtccttacagaggggttgtagcaatggagaataaaaaaaaaaaaaaaaaaaaagacaaatttgagagatgcttagaggtggaactgaaagtccagaaatggtatagcagggagaggggagggaaagggtggggggcaagggaaccctagatttttgacttgagcagctaagtggactgagcactgtgcagtaagatgggaaagatgggggagggagcagggtcaggactagagtgagcaagtgaggtactcacttcagacaccaaatataaggctgcgcctccaaaaaaaatcattaaaaaatataaataatgttttaatgtggtaatttttttaaaaaaaatcaaaatgaatgcaaaaaaaaatccatgaagaacaagatcagggttactgatttttccttttgcctcaggcttcaatatggctcagcacagcactatttctgatcctgtcttgattaaaatgtttaatcttttgctcaccatgggttttttttgcattcatttattcctttttaatactgcatcaaaatattatttgatggctgtgttttctggtgccacccacattttgcacctaggatgagagcttcactcacctccccatttccagcccagaggaagaagcctggggaaaggaggttaactaaggttcagtcttggatatacatggggattaaaatagatctcagggctgagcatggtggttcatgcctgtaatcccagcactttgggaggccgaggcgggcagattacctgagggtaggagttcgagaccagcctggccaacttggcaaaaccccgtcactaccaaaaatacaaaaattagctgggcatggtagcaggtgcctgtaatcccagctacttgggaggctgaagcaggagaattgcttgaacctgggagacggaggttgcagtgagccgagattgcgtcactgcactccagcctgcccctgggcaacagagcaagactcagttctcaaaataaataaataaataaataacctcaggtgtgaagtgcctggaccagagaggacctttaacctgtattgtagtggattctgtgggtacctggcttgttccctaggtctaaccatttcagggcacaacagctgccatcacctgcatttcctgcctcaggactctcttggccaccaaatgagagatactggaagtgctgggtaattaacagcccccccatccccatccccccacacacacacccccacacccccacccagcagccttctgaggcaggagaatggggtctggaggcagggaacctaaggccctttcaggctgactccctagaactaaattgaaagaaaaaccataactttccatacctaagtaaaaaaaggaccagagtctacaccctttgcaaacacccaccttttctgcggggcagatgggaaatgaaagtaccaagacgtttgcataggagtgtaactttgtgatttcacttcagcctctgattatgggccaccacttcatttacatgaggtgaacaccaagtggccaatgggaaacctctagcggatatttggaccagagaagattctgtatccagggcctgctcccacactgtagagtgtactttcattttaaatttctgcttttgttgcttcattctttccttgctttgtgcattttgtccaattctttgttcaagacgccaagaacctgaacaccctccacgagtaacacttcaactactgatccacaggagttggtgtataaataccccagctccctcgcccctcagatgggaccattttgagatatatatgttgcaccatttcccagagtccaggtgagatgaagctccagttgtccaaagtgtaactgattggataatatacccatatgctctgtcccttccccatctcaattctctcccctgttaatggcgtttcccagggtgacttcccaaaaccactgcatgcacttgaatccttgtctcagggcctgcttttaggacaactgaaccaagagacctatgcgtccttcctttttccccctcttctctgtggaaacatagaatgttctgcacacacttggaagtctgagcataccctctaaggagagacccctgactcccagcattcccctgggacggaggtctgtagggtggtaattgccagccagcgctaggaggactggatctgaaatgggcttggctgtgtttctgtaatctctgcaccttgagtggaaaaataattggtagacacctttcttggccattaattctttacagccaacactgagcccttgaggcaaaaactgattgtctgcagttactgcctgcctggtcctgaattcagaacaggaagcctgactctcccccaccctttattacagacaaccactcctccctcttgcagagatgagatgccctccctcacttcctcccagagtccaagaggggccagagaaggctggttgtacagattggaggagacataaatgcccctcaagccagaggaactaagggttgagagccatgagttaaaaatcatggaaggcatagcctttattcatgctttcttttttaaaaatatttttcatcatgcacactttttgcccattaatacccacacaacaacttatgcagtagatgttactcttaacacccattttatagatgaagaggctcagagaaaaagaggggcttagcccaggccacatagagaataaactgatttggacacaggtctgtctgactccaaacaccattctcttcttcatgctataggttgtttttctcccttcagtaaacgtttcttgagcacctacatgtcccacgccccatgctggcctgaaggaggacacaaagataggtaagaaccatttgttcccttcaggaggaagagataaaatctccccagttcttcccatttctgcccattccctatacagagggtcagcatttgcttgttgttttttgttttttgttttagacagtctcgatctgttgctcaggctgcagtggcatgatcttggctcactgcaacctccccctcccagttcaagtgattctcctgcctcagcctcctgggtagctgggactacagatgcctgccaccacgcctggctaatttttgtatttttagtagagacggagtttcaccattttggccaggctagtctcgaactcctgacctcatgtgatctgcccccctcagcctcccaaagtgctggggtcacaggcgtgagccaccacgcccactcagcatctatttttataagatgtatatattgcctatagcagctttaatgctacaaatttgagtaggtgtagcagagaccatgtggcccacaaagctgaaatattggctgcctggccctttacaggaaaagtttgccaactcctggtccacaccgtgccaggcactgacgatgcaccaccacacttacttctcaactcgactctggaaggtgtcctactacgatgtccatgctacagatgagaaatgaggctcagaggcaggagatggcttgtcccattgctggaaaggtacaaagttggataattccaaagcccaccacggctccaagccacataaaaaatgttgatggccaatgttttgaaacattagcattcactcttgaaagagctcacaaccggccagcgcagtagctcacgcctgtaatcccagcaccttgggaggccaaggtgggcagatcatgattttaggagatcaagaccatcctggctaatacggtgaaatcccatctgtactaaaaatacaaaaaattagccgggtttggtgggcaagcgcctgtagttccagctacttgggaggctgaggcaggagaatcgcttgaacccgggaggcagaggttgcagtgagccaagatgacaccactgcactccagcctgggtgagaaagcgagagtctgtctcaaaaaaaaaaaaaaaagaaagaaagagctcacaacctccattagcagtgggccactggactatccccatagtccccactccgcaaacacctacatctgccatgttgtcttagagagacctgaacctggtcaggtccccagtcctgcacgggtgcccttctcctacaggcaccagaagacctttcactgtggtgaacaggcattcatgagttcatccaaaatctgaggctggtgtcatgatcttctgttactcagtctttgtgggagggcaggttcacatctgaaggaggagctgaaagttggctggagtgcaccacatggcaaaagtggcccgtttatgagaagctccttaaacttggtctttttctctactcctgtgagacaggtaagatgcttaaatctacacttttttttttttttttaagagacaggttcttgctctcttgcccaggccggagtgcaataccacgatcctagctcactgcaggcttgaactcctgggatcaagcgatactcccacatagctgggactacaggtgcccgccaccatgcccagctattttttttttgtttgttcgtttgtttgtttttggtagagatgaggttgtgctgtatagcgcaagctggtctcaaactcctgggctcaagcaattctcccgccttggcctcccaaagtgctgggattagcagccctgagccaccacgcccaactatattacctagttctttttttttttttttttttttttttgagatggagtctcactctgtctcccaggctggagtgcagtggtgcaatctcggctcactgcaaacgccacctcccaggttcaagcgattctcctacttcagcctcccaagtagctagaattacaggcatgtgccaccacacccagctaatttttgtatttttagtagagatggggtttcgctatgttggtcaggctggtctcaaactcctgacctcaggtgatccgcccaccttggcctcccaaagtgctgggattacagccatgagccactgctcctgactacattaactagttcttatcaggagctgactgcctttagcatacacaatttgcactgttgtcctcccagcactcaccttcacaagccaaaggcttgctcgcaactcctacctcccagccctggggcttcttaatttctggctgtggaagaagattcagccaatcaagcaagcaggaaatgccagagtgaacactcctggaagcaagcttcaaccaagggcagctgggcagttaacgtatgaacacccagctttctccctgcttggctgggaggccatcctctcccctctgtccgaggtgtgttctgccccgtctcccagagttcacagaggcatgaagctccagttgctctgggctgtcctcatcccacaaacacattggctgacttcctcccattccctgtctcacatcttctcctactggtgcttgctgggatcacctcccaaatcaactacttgtaaaataatactgagaatcttgtctcagaggctgcttctggaaaaattcagagacaagcaccaagagttcttcatgccctctcacctgatcctgacactgccccgggagccagcttcatccccatttttctgaggtgtcggctgaggggctcacagaggtaaagcaagcagaaccccagcctgctaggcattagcaagggccagagggctcaagaaaaggtcctgcatcaggcatggtggctcacgtatataatcccagcactttgggaggccaaggcaggcggattacttgagtccaggagttcgagagcagcctgggcaacatggcaaaaccctgtctctacaaaaaaaatcagccaggcacggtggctcatgcctgtaatcccagcaccttgggaggccgaggtgggtggatcatgaggtcaggagatcgagaccatcctggctaacacggtgaaaccccgtctctactaaaaatacaaaaagttagccaggcatggtggcgggcacctgtagtcccagctacttgggaggctgaggcaggagaatggcatgaacccgggaggcgagcttgtagtgagccgagatcgtgccactgcactctagcctgggcaacagagccagactccatctcaaaaaaaaaaaaaaaaatcaaaaacttagccagatgtcgtggctcatgcctatggtcccagctactcgggaggctgaggtgggaggatcgcttgagcccaggagatggaggctgtagtgagccatgatcatgccacttaactccagcctgggcgacagagcaaaaccccatctcaaataactaaataaaataaaaagaaagcgtcctggtcttcatcacagagtgaaactgtcccaaaccgaggctacactccaaccttccagctctttctgctccaggtccagctcccacctcccatgtagccatcctctatccaagaagatggctgtaatgggaccagaatcagcctgtcataaaagatggagaactaagagctctccataaaaatgatctccatggcaaaattaggagggaaaaacagcatggatgaaagttgcatttattaaataataatcgcgaacgctcacttcatgcctactgtatgctagctgctgttccaagtgttttacaatgaaataaatttttaaaatttttgcacaactctttgagataggcactattgctttcttcattttacagtcaaggaactgaggcacgagaaagttatgaagtttgtccagggtcataaagctagcagatgagggaactagactcaggcagtataactccagctacagtcattacaatgagccacacaacgcagtgggtcaaggaggagccactcacacaaagatcgtcccataagattataaccgtattttcaacatacttttctatgtttagatgaggttggaggcaggactggactcgaggtggagcttgcacaccagaccagattgaagactagctgaaacaggaaagaggtaaaaggatgctctgtaagacacacccaccagtgccctgtcagtttactgttgccatggcaacacccggacgttctcaccccttcccatggcaatgacccgtctacgcagaagttactgctatttttctagaaatttcttcataatccaccccttaatttgcatgtaattaaaagtggatcttgaccggctgcagtggctcatgcctgtaatcccagcacttcgaaaggctgaggcaggaggatcacctgagatcaggagtttgagaccagtctggccaatatggtgaaaccccgtctctactaaaaatacaaaaatcagccgggtatggtagcaggcgcctgtaatcccagctactacagaagctgaggtgggagaatcgcttgaaccctggaggcagaagttgcaacgagtcgagatcgcgccaatgcactccagcctgggtgacacagcaagactcgatctcaaaaaaaaaaaaaaaaagtgaatatcaatatgagtgcagaactgcccctggccctgagctgctattctgtcacactgcctgtggcagtacctctgtggctgacgtacgctgcttcaataaaagttgctaacatcaccggctcacccttgaattctttcctggacaaagacaagaactctcccaagctaagccccaattctggggcttgccagtctggcgtcatccatacacagacacttcccactgtgttaccatcgtctatgttatggggtcagttgcatgctgcagtttgtagcctaggggtggcaggctgcaccagccctagtgtgtgggaggctatcccatctagggatgtatagtggactctatgatgttcacacagggttgaaatcacctaatacaacttttctcagaacatatccccgtctttaagggacacacggctgtactcccaaccctcttccccatagggtgcctgtggcacaaagtgggttctctcaatgatccgttgagagacactgtggcactgcgggagacagcgtcccctacaggcctggaggtcccagttttcggttttgttcagatgtgaaggaagttctggcatctgcctagggtggggtgaattttttaggtggggggtggggaatggagtctccctctgttgcccaggctggagtgccgtggtgtgatcttggctcactgcagcctccacctcccgggttcaagcgattctcctgcctcagcctctggagtagttggaattacaggcacgcaccaccatgcccttttgtattcttagcagagacggggttttaccatgtttagccaggctggtctcaaactcctgaccctcaagtgatccgcccacctcagcctcccaaagtgctgggattacaggcatgagccactgcaccgggccttagggtgggatgaaagaggcttaaccaaggctctctgaggacaaaaacatgggatgaccttcttagctttttttttttttttttttgagagggagttttgctcttgtcacccaggctggaatgcagtggcacgatcgtggctggctgcaacctctacctcccgggttcaagcgattctcgtgcctcagtctcccgagtagctgggactacaggtgcctgccaccatgcctggctaatttttgtattttttagtagagacggggtttcactgtgttggccaagctggtctcaaactcctgacctcaggtgatgcacccacctcggcttcccaaagtgctggaattacaggcgtgagccactgcgcctggccagctttgttttttatcatctttattgatacataatttacatatggtaaagtgcacctattttaagtagacagttcaatgagttttgacaaatatatacgtttgtgtagacatcgcaataatcatgatctggaacatttccctcactccttcctgcctctcgacagtcaattccctcctccagtcgccagctggggcagccacttatctgcttgctgtcccttcagttccacctttcctagtgtggtcccctgagcatctgcctctcggctctgcaggaggattttaacacgcagggccccaggccctgcatgcacccagggagcctgatgctgatgatgggacccacatatccgtgtttcagtggtgctcgccaatgcctgagaccactgccttgggactgcgatttttggatggcccacctgggcctgtctcatctggttatgtcccctgagatgagcactgtgcccgggctagttggggtgcctgaaaacaactcatttcccctcactctccaaggaggtacattctgtacctctgccatgtggcagacccgctcagcttttcctgcctgtgacattagagggccaccatgtgaggcagcttttgctaccagaataagggctgcagtgaaaagcacatgcacccccgaggcaatcaggaacatgcttccattatatctgtccagatgacagcatgtggaactaatgatgagtaaaaggtctgcaagccacagcctggccaggccggaaacctgcatgcaccagcttcaggaaagatctgagaggggacctcagtgctgcttcctgcaggattctgacaggcttgaagacaatgctgctaactgaagtatgctgtgggctgtaactgtctctgatcttccccatggcctcatgctcttcacctgacatgtggccaactaggattttcctcatcaacttttttttttttttttgagacagagtttcactcttgtgcccaggctggagtacaatggtgcagtctcagctccctgctacctctatctcttgggttcaagccattctcctgcctcagcctcctaaggagctgggattacaggtgcctgccaccatgcctggctaatttttgtatttttagtagagacggggtttcaccaagttggccaggctggtctcgaactccttacctcaggtgatccgcccacctcagcctcccaaaagtgctgggaatacaggtgtgagccaccacacctggcattctcatcagcatttctatttcaccactgccccggaaacccgggcaatgatcctgagtctacccaccagtacctactggatttccattctgctgactggcctgcttccacatttgccacaatggacaatttcaaaagcttctttttttttttttttttttaagagatggggtcttgtctaggtacaatggctcacacctgtaatcccagcacttttggaggccaaggtgggcacatcacttgaggtcaggagttcaagaccagcctggccaacatggtgaaatccctgtctctactaaaaatacaaaaattagttgggcatgatggcgcatacctgtagtcccagctactcaggaggctgaggcaggagaatcacttgaacccaggagacggaggttgcagtgagccgagatccaaccgctgcactccagcctgggcgacagagtgagactctgtctcaaaaaaacaaaaaacaaaaagagatggggtcttgctatgttgtccagtttggattcaaactcctagactcaagtaagcctcctgctccagcctcccaagcagctgggactatgggcactcatcacccttcccagctttttccaggagcttcttgattccaatctggctccaagcagcaggagaagtaggactgagtgaggaattgggctccagccaccaccaaaggccgcagctcttacctggcgtagagaacaacaaactgtggcaccaacagtcatatccagacaagtccaggaaggccaaggtcagctctgagggccacacatgaaactgagcacgtcagcagtgagcagccagaaggatgaacagacttgaaaccagatcacaggagggatatctggggatgtgttagtccattctcacactgctataaagataatactgagactgagtaattcataaagaaaagagttttaattgactcgtggttctgcatggcaggggaggcctcaggaaacttacaatcatggcagaaggtgaaggggaagcaggcacgtcttacctggcagcaggagagagagagaagagagagagaggggagaaagcagggagagggagagggagagggagagacagggagggagagagagggagagaggaaggaagggagagagggagagagaggaagggagagggagagagggagggagggagagagggagggagggagggagagagggagggagggagagagggagggagggagggagagagggagggagggagagagggagggagggagagagagatcgagagagagagatagatagagatagagagagatagagagagagagagagcacaaaagagaaactgccacttataaaccattagatctcatgagaactccctcactatcacgagaacagcatgggggaaaccacccccgtgacccaattgtctcccaccaggtgcctccctccacggggggattacaatttgagatgagatttgggtggagacacagagcctaaccatatcagggagactatgggcatttagccagaagagaggacatgaatagagcatctgagtgctgaccccaacatctgaaagacccatttgtgggaaacagatgtatttgcacagcctcgggcacagccaggaccagtgggtagacaattcaaggaaggcaattgtttatataaagaattaataacacacagtgaaagatgtccaacaatggacttggacccccagttaaacagtgaactctccaacaggggtgtagccaagtgagggccagaaaacttctaggtgaataagaggcttgacaattagaagacttggattcggggaccttcaagaaccttctatcaatagctgtgagcttctttcaggcaggaatgagccgctgttaatttttctgccaccgtaatcacactgatagccaccaggtggcaacaaagccacaccttcagcaccatggatcatgtcctagccaacagaaaacccattggaaaacaagccccctgccccctcaaccaaaccataaacaactaattgattcagattaattaacatttctggacaaagactgtaaatcaagttctcaaccgagcgtggtgtaatcccagcacttcgggaggccgaggtgggcaaatcacaaggtcagaagtttgagaccagcctggccaacatggtaaaaccccaactctactaaaaatacaaaaattagccaggagtgatggcacacgcctgtaatcctagctactcaggaggctgagacaggagaattgcttgaacccaggaggcagaggttgcagtgagacaggagcatcacttgaacccaggaagtggaggttgcagtgaaacaggagaattgcttgaacccaggaggtggaggttgcagtgagctgagatcgtgtcactgcactccagcctggtggcacagcgagactccatctcagaaaaaacaaataaataaagttatcagtagagctttagttaccagcatgacccagagggctctaggtgaagtgtgtaattgtaattttctttagagatttatcatcttttttgttttaattttccggtgaagtacaacatgcatacagtagcatgcacaaatcatcagcacacagctcagcgcctcttcataaacagagcacccccgtacccagctcaagaaacaaaatgtgatcagaattccagcagcccctcataccccttcctagccctcccctccctaggttacggtgacagccactaccagctttcagctttaatggacaccaccatgcagctttccaaagtgattgtgccaatttacactgccaacaacaatctgagagttccagtggctccagagccacactggaattttctgtttggataagtcttggcggaggaaatgtgggatctggtgaggacatccttgctcccctctgaaggtggtgtgtctgggcagcactaaccagaaggtggaagattccatcccaccagcacatcctggtgaacccatcagcacactaatatctgctgaatggagagtctcgcttcacgtgctctgcacaatgtcccagagtggcgctgctctcaattagcacttactatgtgtgctgcagttttgtttttgttttgttttgtttttagagatagggtctcactctgtcacccaggctggagtgcattagctcactgcagccttgaaaccctggtttcaagcacctttctgcctcagcctcccaggtagctgggactacaggtatgtgctattgtgtctagctgtatgtggacttttcttttttctttttttttcttttttctttttttttttttgagatgaagtcttgctcactctatcgcccaggttggagtgcagtgctgtgatcttggctcattgcactgcaacccgtgcctccccagttcaagtgattctcttccctcagcctcctgagtagctgggattgcaggcatgcaccactacacccagctaatttttgtatttttactagagacgggggtttcaccatgttggccaggctggtctcgaactcctgacctcaggtgatccgcccgcctcagcctcgcaaagagctggaattacaggcttgagccactgtgcccggcccatttttggacttttctaaggactggacatgaaggtgtaaaaagacagacagcatccctgctccactgacactgacattctcgttggggatgggagaggcagaaatacatatctcgggtgatgaaaatttctacgaaaaaaagtggaacaggggaagaagagacacagagtgcaggggaaaaactctatttttaaataggtggttgaggaggcgcttctgataacagtctgtttcctgctgatataccacaaactgggtaatttataatgaaattagaataccacaaactgggtaatttataatgaaaaatttatttctctccctctttaaggctagtcaagtgacgcagtggaagtggagaaggaacaaagaaatctgtaactgattgtgatcaattagttgcaaacatcattgcacttggaccagccagaaaagaaatttatttcttacacaagacagagaggcaccggggccagactcgctttataacaatccaccctctcaataaccaacccactccttccgtaataacgacattaattcatgaaggctccacccccattcatgattcaatcgcctcttattaggccccacctcccaatatcatgcactggggataaagtctccaacacagaaattgttgagggacatgttcaagccacagcaataacgttgagcagaaaccaaaagaaaatgaggggagcaaatcacagaaaaatagttccagatgcagggagctgtcccgtgacaaggccctgaggtcagtgtatgtttggcacattcaagagctggtgggagaaggaagggtaagaaatgcagggagagttggagggatgtgactgtataggacctacccccattgatgttcaaaagcaaccgcaaacccatccaatacacacatgtgtagtcgtatcaagagctgggggttttaggccaggcaaggtggctcatgcctgtaatcccagcactttgaaaggccgaggtgggcagatcagttgagtctaggagttcgagactagcctgggcaacatggcaaaaccccatctctaaaaaaaattagctggacgtggtggcgcatgccagtagtcccagctactcaggaggctgaggtgggaaaatttcctgagcccgggaggtggagattgcagtaagccaagatggcaccactgcactgcagcctggatgaccaagtgagactctgactcaaaaaaaaaaaaaaagcggggtggggcggggcttgaggtggtgttatttacaaaaacaatgggatcatgcatatattaaaacttgccttcttaacaacactcagaagcatcattagtggtcagtcacacagattgaggtaagcaaacctcttctgtgaagagccagcgaggaaatagttcaggctttgcaggctggatagtctctgttgcaaccactcaatataataacaaatcaagactgctgttgtagcttgagaggagccatagacaatgtgtaaatgaatgggtgatactgtgttcccacagaaccttatttacaaaacaagtggcaggccaagatttgactggggccctagtttgcaaagctgacacatgacgttactatggttttcccaatgctgagaacagtaggcattcgataaatatttatttgaaatgagaataatcttacttattttcattgtggaagagtattccatggcttgaataagcatccctggacctatgattttacaaactggccccttgtcaaatagatttctaggattaaggttactgggtcaaaggtttatgaacttgctgtttgtcaattaaccactacctccctgaaaccctttccactcctagcttctgtgacaccacactcttttcgggttttttccttacctttttagacacttcccagttgccattcctaaatttttggaagggagggggacaggtcttcactctgtggcccaggctggagagaagtcacacaatcacgactcactgcagcctgaaacacctgggctcaagtgatcctcctgcctttgcctcccaagtagctaggactacaggtgcgtgccgccatgcctactaacatttttctttctttttttgacacgtagtctcgttctgtcgcccaggctggagtgcagtagtgcaatctctgctcactgcgacctccacctcccgggtttaagcgattctcagtctcccgagcagctgggattacaggcctgcaccaccacacacggctaatttttgtgtttttagtggagacagggtttcaccattttggccaggctggtctcgaactcctgacctcaagtgatctgcccacctcgtcctcccaaagtgttgggattacaggcgttagccactgtgcctggccttttttcattttttgtagacttgctatattgcccaggctggtcttgaactcctggcctccagagatcctcccacctcatcctcccaaagcgctaggattacaagcacaagtccctgcacccagcttccattcctaaatttaacaaaatttcagagtccctgtggtagtgtgtgtggaattggttccttccggtgggttcttggtcttgctgacttcaagaatgaagccgcggaccctcgcagtgagtgttacagttcttaaagatggtgtgtccggagtttctccttcagatgttcagatgtgtcccgagttccttccttccagtgggttcgtggtcttaagctgcagaccttctgcagtgagtgttacagctcttaaaggtagtgcggacccaaagagtgggcagcagcaagatttatatgtgcatgtatacataaatatgtatagagagaggcttaagtccatggaatgtagttagggaaaggagaatttgacaatgataacatttgttactcatcaaactctcatttttaaaaaatttattaaaattatttgcaagagttgaagcaggaaatgacactcttacggtattggtgggactggacattgctttggggagttagtgggatagtatttattgaaggatagggaattcgtttgtcaaagagaaagatgcagctgatatcatccactcttcctctcacttctctttcccaaagcccagtggctacccctaacaaaaaacccaagagcactgctgcggaagagaaaacagtttcaaatatcataattgagagaggtgctggattgtcaccattctgtggagtcttcctgaggacccaactctgctgatgtgttgggagaacaactcaaaggagaaatggtagatgtgcagcatgggagctcatatcttttcttatttctttctttcctttctctcctttcttttttagacaagagtcttgctctgtcacccaggctggagtgaagtggagccatcatacctcactgcagccttgacctccagggctcaagtgatcctcccacctcagtccctggagtagctgggactacaagtatacgccgccagtactggccttttttttttttaagagatggagtcttgctatgttgttcaggctggtcttgtgctcctgggatcaagtgatcccatctctgcctctcaaggtgatgggattacaggtgtgagccacggtgcccggcaaatcccctctcgtagcaactcaggtgtatttgtatggagtggagtgaatatagcagtagttgctccaggaacagaatccagaattggaaactgtcagtgacagagttagaaagaatcatgaatcagatgactgaaagatcctctgaggctcttccaactgggagattggattgcatgttgccaagctagtccaaacttcgttttaaaaacttccataggctgggcatggtggctcatgcctgtaatcccagcactttgggaggatgaggcttgaactccttgagcccaggagatcaagatcagcctgggtaacatagggagaccctgcctctatttaaaaaagaaaagaaaaaaacttctgtacaggattcatttggaatagcacttctcaacctcagctattgacattggggaccagataatccttcgtggtggggctgtcctgtgccttgcaggatgtttcgtggcatccctggcctctacccatgagatacgagcagctccttccctcctccagctgtgacaaccagaaagtcttcagatattgacagatgtccgcaggggggacagaactaccccctgttgagaaccactgccccctgttgagagccttcccaatagctgtgactataggcatgtgccaccatgcccagctaattttttaaaaaaaaagttttttgtagagatgggatcttgccatgttgcccaggttgatatcgaactcctgggctcaagcaatcctctcacctgggcctcccaaagtgctgggattacaggcgtgagctactacgccttgctccttgcttttctttatttcattgagtcagtgtcttgctttgtcatccaggctgcagtgcagtggcatgatcatagcttactgcagcctcgaactcctgggctcaagagatcttcctgcctcagcttcccaaggtgcagggattacagaatcatattttttatctgactttaagcacggtctctatctcccccagtcgtgacaaacaacgtttccctccagactgccaaatagctccaggagggcaaaccccgcccccccttttcaacccgaagcggaaggatattgaggttgcaccactcaaaacagagcaggaatacaaaaatatccaaagagctggtgttgggcttggcacaatggctcacgcctataatcccagcactttgggaggcagagacgggtggatcacctcaggttgggagttcgaaacgagaccagcctaacatggtgaaaccccgtctctactaaaaatacaaaattagctgggcgtggtggtgcatgcctgtaatcccagctactcgggaggctgaggcaggagaatcacttgaacccaggaggcggaggttgcagtgagccgagatggcacaggtgtgagccacagagcctggcctgggctgcgttctttcaggaggctctggggcgaatctgttccctcgtgtcttccagcttccagaggctactggcaccctttggcttatggttccttcctccatcttcaaagccattaacttcggttgtgactttcttacagccaatcactctgaccccaatcccagcctcctttgtcacatctgcttctctgactgtggctctcctgtccccctcttgtaatcacccttatgatcacatggggcccacctggacaatcccggggcatctctgcatctcaagatgctcaacttaatcagatctgcaaagtcccttttgacatacaaggtaacatcttcacaggtttcagggattaggattaggattaggacatagacatctttagggggaacccttattctgcctaccgaggtgaagaggtgaagccggctgggcttctgggttgggtggggacttggagaactttcccgtctagctaaaggattgaaaacacaccaatcagtgctctctgtctagctaaaggtttgtaaacacaccaatcagcactctgtaaaaacggaccaatcaacattctgtaaaatggaccaatcagcaggatgtaggcagggccaaataagggactaaaaactggcggtccagccagcagtggcaacccgctcgggtccccttccacgctgcggaagctttgttctttccttcaggcaggttggagtcttgctttgtcacccaggctggagtgcagtggcatgatcatagctcactgcagcctcgaacacctgggctcaagagatcctcttgcctcagcttcccaaggtgtggggattacagactcgtattttttatttatctaactttaagcacggcctctacctcccccagtcgtgacaaacaacgtttccctctagacttccaaatagctccaggaggacaaaacccccctttttcaacccgaagcttaaggatattgaggttgcaccactcaaaacagagcaggaatacataaatatctaaagagctggtgttatctcagtgatatccctttttttttttttttttttttttagcttcggcggtgacacctactctcctggtcttctccctacctcgctagtcactcctcccagtctcctttcctgcgcttaaatttcagagtaccccaggcgttggcctgggtcttccgctctccacttaaacttactcctttgaggttttcaatctggttctacagctttaaatagcatctccattgataaactcacaaaataaggcactttcaagtcagtggaggaaatgatagtattgggacaaaggactttccatacacgggagaaaaaaaatcgttcgtcgctgtgggagggctgccgggtctcgtccacgctcccttttgagcacctacagtgagcgtaggattgccacggatagcccaatccacaagtgagtcaagctgccagggctccaagaaagacccatggagggagaggggaacgtccggggaggcgaaggctgcgagtgagacccggagaggctgatgtcggcgggtctgcgcgctcgcaacgcgacctccgcccggtcagcaagacctcggcgcgcgatcctcagattctgcgaaacaagacaagcgactgggtccgagaccgcggtccccatcaaaacgagcatcaaccaatcgctgggagaaatccgcagcctcgttttaagccaccaagcagagaccgcggcgacctattatgataacctcgagaaccaatgaaaaacggggattcgctcagcccgcctcccgagcttcaaccccgaagagatcgcgcacagttttataaaaggtacaaattagaaagcagttctgcggctggattagagacattgtgttttcaaagacggtggggagggctagagaaaaatcctagaagctagcaagaccgcactacaccgaaacgtcgcgggcaacggactcgccagtcaccatctagcccagggacgacgcgggacggacgtgccgctgcgcgctgacatcacgctccaggccccgccccaccggccgcccatatagcgaaagcctggcgcgcgcgcgcgccattgtgtggctggactcggccgcccctgtggtgtgaggcgcgtgttcgggctcttgccgtccccgcacccgcaccgcggttactggcttgcggtccgccgttcgacaaccagcccttgggtccccgcccgccacggacatgccgcgcgtctacataggacgcctgagctacaacgtccgggagaaggacatccagcgctttttcagtggctatggccgcctcctcgaagtagacctcaaaaatgggtgagtcgggcctgggcgcccgcgcccagcgtcccaggcctggtggcggcgggaactctccaaggaaagaagcggccaaggccgcggcgccgcgtggcagggcctcaaagatggcgacggcgcggcgtcgcgggggcgcgcggtggggtacgggcgcgcgcacgtgcgcgtcctggctaacgactcccccgcggttgtccggccctcgcaccgcccctaggtacggcttcgtggagttcgaggactcccgcgacgccgacgacgccgtttacgagctgaacggcaaggagctctgcggcgagcgcgtgatcgtagagcacgcccggggcccgcgtcgcgatcgcgacggctacagctacggaagccgcagtgagtcccacccccgcgcgctccgcgcccttggggaccctgggggcgggggtgggtggggtggggcctcccagcccgggcaggcgcgagggccgggggtcgtttgacttgggtgtccccgagccccgctgccttcacgtctgcccggggcagccatgggacgccggagcgcggggattgggtttgggtgtttggttttgtttatttgccaagttgggaggtgggtggcttcttctggccccttgtcagcactgtcacgggttcttcccacagaggaagtaaggggtggctgtatttgttgtattctccttacttacctatcagtgcattagttagaggttcgggggcaggctcgggtggaggtggggtagggggcgcgggggacggggaaggggaggagcataaagtataggtcttaaagctatggaacttgatgggggccaaagaatgtactatttttaagtaatgtggtattgtaccacaaagtagatctaaataagctttatgctgtatttgaactaattggggcatgttattgggaggaggttggggggatttttggttatgttaaatgtttgatgtttaaattgttgcatgttgaattcaaactttttaacaagtccttgatgtttcaatttgaaagtgaccaatggggctgaggctgtgtccactgaggctaagatgactgcctttcctgattggccttggcttttccatacattgtgtgacccttgccctatgaccctttggctgaccttaccggaagccatgacgacagcagccttttgccattagacgcagggtgatggtgaggattccaagggttagacaaaactggttaatctgaactaggtgactgttaccttgcgtgttttgtggccaaaccaccaccaaaaacctcacactgtgatgtaagtacttagtgtaaaactagtaaacatttttgtaaaatgtagaaatgcatgtaatcagttaagttttatattttacaatgttctgtaaaataaaacttagcgaggtaaatcgaataaaggagcagtcactctctaacagattgtaggagaggtttagttggatttagtctatttgacttgcccttaatttaattttatggcaaatcacaaatgtgtcgaaggtttagcaatataatagcaaagtcctactccagtaaataaaagttgatatgtttgtactaactttcaaagacattatgcgtttttatcattacaaggcatctaattgttcccttcatgtgataaaggtggtggaggtggatacagcagtcggagaacatctggcagagacaaatacggaccacctgttcgtacagaatacaggcttattgtagaaaatctttctagtcggtgcagttggcaagatttaaaggtatgttttgtaattcaagatagaaatgatatgactaatgctttaaagtaaactccttttatattcttatttctgggaatttattatggtatatagatgttttaagatttccgagtctgaccaatcttgtctttcaggattttatgcgacaagcaggtgaagtaacctatgcggatgcccacaaggaacgaacaaatgagggtgtaattgagtttcgctcctactctgacatgaagcgtgctttggacaaactggatggcacagaaataaatggcagaaatattaggcttattgaagataagccacgcacaagccataggcgatcttactctggaagcagatccaggtaacttgttgaaggacactgtgggaaggaaacaatatttgccaataaaaagggagtaattgagtgatgtcaattgttgcctacttgaattaaagccagcttttagtttgttttggctgtgcatcattgcgttcttttctggatgttttgaacagtgtatttaatttcgtagtaaagaaaaacattattctttggcttatctatttttgccagatggcacggatgtatttaagttggattgggattaagacttcattgtttttctcctaataggtctcgatctagaagacggtcacgaagtaggagtcgcaggagcagccgcagtagatctcgaagtatctcaaaaagtcgctcccggtaaataacgttgtgttgagtcactgtgaatattaccgtacttgtttatggagtatgtgtacattctcactaagtattgagaaaatcggtctttccttgtccagttccaggtcgcggagcaaaggtcgatcacgttctcgatcaaaaggcaggaaatctagatcaaagagcaaatctaagcccaagtctgatcggggctcccattcacattctcgaagcagatctaaggatgagtatgagaaatctcgaagcaggtctcggtcccgatcccctaaagaaaatggaaagggtgatataaagtcaaaatccagatcaaggagccagtcccgttccaattcgccgctacctgttccaccctcaaaggcccgttctgtgtcccctccaccaaaaagagctacttcaagatcccgttctagatctcgctcaaagtcaagatcaaggtccaggtcgagttccagagattaactcagaactccttgtttgcacattattatggaacactttcctacttaggcagttactcttccatgtttatacttggcctcttctgcaagaggaatctcttgaaaacaggggcacacagaaatttgatttgtggccaaattggatgaaaaagatgaggctctaaggaaatggtggcatgaagaccctctcccttctttgtagaattaagataactttgattttatagcttttgagctaacgtaacttttgtaaagattaagctcatttagtgttgtttttttttttttttttttttttttttttttttttttagtatttcagcaggatctgctggcagggtttttttgttttatttgtttgcttatttttaaattaactgttttgagctttgaatacttaaggctttagagggagaacccaattttcaattatgttggctttttataaagcttgagttatgtaagatttaaataaaagtttgctaccaagatgattgccttattgaataggtcactattaaattcctttaaatgttgatatctgccatttgtggaaacaacgtaaattctacttaagtgtaaacaaggcaagcctcagaccagcaataaattactcagtttggataacattattttgtgcagttaatcaaatttgccaaagtctttatctgcccctttaacaagttgagtaaaaataaaaggtattttttagtcaatgtgttccatgattttgcttaaattaatacttttaagtaatggaacttttttcaaaggcaaatttaaactatttaagaaatagctcctaatacttgggatcttgtttagagaatccactttctggaagttctcagcataattagtgttgagagtggttcagttgtctttaatgtttgtcatgtggaaatggaagtagcctctttttgttctgaaattgagtttattcaaagtgtaaaagcacatactgcattttctgctgaaagatcattatgtttaacaggcacttaatctcagtaaagtcagttgccagttaagttccacccagtagtcagtcccctttgtagttagtgggattatttgataattggttagatcatacttgtaaattttaatgctttgtgtaattggtttgaaaaacagtgaaatgggtaaacgcaaaacttttgtactttattacgagtaaagtgtaatgagtactgtggaaaccaaatttgaatactgcaaatttgtaggagttactaggttagcaattagtccatacatccataagcctgatgagttgaaattgcagtttgagaagtgaattaaccttacatccctttgttcagataccttaaaagttactttatttaaaagcatttattaatcttagtctgaaatcaaaatatagattaattggctcagctttaatacctttctaggaggtgtcacaatgtagggtaccaagggttggattgtgatggggcatggtcgtacactgctcattgtgccacaggtgtgactggaaagcatgatattctagggttggtttgtagattcaaataatccagaaatatacctaataagattgagtgaaaaatttgagtcaaatatctagggcattcacagagtagctgtgagttcttggtaatgtgaaaaaggccttgtttttcagaaattcctgggtttcctgttaaaaaatcttaaagcccaaccttaggaatatagtgccccaaaaggcggatgcttcttccattatcttattttctttgatactttatttaattagatgtttataaagaaatgggtttatttttccagcataaacctcagaatttaaggaaagaaaatgatgtctgttgttatagttcattgttttgcctactcagcagaagtgatgactcttaaaaattggctttgaccaaagttctcttgttttcagggaaagaacataaaagctttttgaactacagcctttttaaaagagggatgggaggatattacagtaagaaattaggctttctaaaagtatgaaacatccttcaactgggctctcttgttaataggacatcatatggtaatagactggtttgactatattgttagctgccacagtaagcaggtcattgtataggtaaatgcctgcacccataattttctagtaatagccacgaccaatttattaacagtcagggcctatccttgcctgtagttctcagtcactggatgcacaaaatcactgtgtaacattggctcacttggtgagcatagggttgactgataaaatgtttaattcccttgctagcttgtgagaagaatgagttgatgacatgctccataccagtggctagatggagtattaaggtggagcagaaaagaagtgagaacatcttgattcccctttcttttacttgatggtgtttatgaacatgccgtagtgcctttatggccagtttgagtcctgcctactttgacttttacgttcccattcctgtgttaccaccttcctcccgatttgttcacctattttgtgctttaaatctcaataaaatacttactgagggaaaggcttgttttgagtttattgcatatgcccacttaggaccagattcttaacaaatgtttttttgaattggagtttgcattggcaagccattcctgtcttgagtatgagaacaggatcttgtgttcacttacccagaaacgtgagtttgggatttagtatatggtttatgttgggcaactcattaatcactgtgcttcagtgtcatccatgaaactagggataaaacatgcatgggatgtgaagattaaaagtcaagaatatgaacagtacaagagagtaccataacaaatacaattttatttacaaatatacatggttggaccataccttggaatctacttgctaatgcagctgctgttaacagttcttgtatctgctcaagagatttctatgatcatataaaaatgcctttttaggttttcagtgttcatgccctgagtagtagtctgcagtttgctttaatacatggtaatacagagatcggctttaaatggctggctggttactgttgaatgaatgtatgataaattttttttcagaaccaacagtgtgaataatcctttcagttgtctatcagcatgaatttaaaaattactttcaagattcaacattacacaataaaacttagagttcttgcaatagagcacctagtgtagtaattaccgatttatatgctaatctttgagtttcctcagtgaccatattttgaataacagattagtatcccgaacatgtatgcatccatttactgaaacgacaagtcagtacaattgtgcagttggtcttcgtacatcctatatagcttgtttacatatgcctgtttatctttgagcaatcctgcagatggcccccagtatagcacttaacacagtcgttaactttttattccttttgaatagaaaggaatcatggttcaaaaattagaagagtgggtgcggtggctcatgcctgtaatcccggcactttgggaggccaagacaggaggatcacctgagctcaggaattcaagaccagcctggccaacatggtgaaaccctgtctccaccaaaaatataaaaattagccaggcatggtgttgcgtgcttgtagtcctactacttgggagactgagacagacagaagaattgcttgaacccaggaggcggaggttgcagttagccaagataacaccatggcactccagcctgggcgacagagtgaaaccctgtctcaaaaaaaattttttttcaatgtgttttctgggaacagggccattatcttctgtaactacagaattatcaaaatcaggaaattaactgataaaatactgttgtctgatacacagttcataccgaagtttcatcagttgtcccttaatgtcccttacattttttctcttggtccaagattcattggttgcattttgttgtcatggttcttgagtctctaaatctctaatgcatcctcaggctttttcttcatgttactttttgaagaggagttaatatacctagcctccagttagcctcctctccctcaaaattattttaaaaaatgacttaatagtgatccaggttattaacatgggtcactggacataatacatcgaggacagagtctcattcttgtgatattcctgcccaaaatgctgtcatgtagaaacgagacaaatccaagatgagggcaaaacctacaaaataaacttttcttccccccacgagacagagtttaactattgttacccaggctggagtgcgatggtgcaatctcagctcaccacaacctccacctcctgggctgaagctattcacctccctcaacctcccgagtagctgggattacaggcatgtgccaccacgcccagctaagattgtatttttttaatagaggcagggtttctccatgttggtcaggctgatctcgaactcctgacctcaggtgatcccccgcctcggcctcccaaagtgctgggactacaggtgtgagctaccttgcctggccttctaccataaaggaattgctttggaggggtggcggggaggagggggcaggtacactatatgggttttctttaggttttctgttttttaagagatggagtctcactctgttacccaggctggagtgcagtggtgcaatcatgggcccaagcgatgctcccacctcagtctcccaaattgccgagacaagtgtgcaccaccacacccagctaagggagtagacttttaaaggtaaggtttaaagaaggtggttttttatttttgtctttaggagggaaccaatttggagattaagagctgctgaaggcaaagctttgatggcatcagatagaacccccattactgctgaaagcagagcaagtcccctagcccaaggccaaaaggattgggaggcaaataagttgcaccctcatctataaaacaagacctgctaatattgtgaaaagtaaatactattatcaaagcatttggcatagtcactcattaaatagtaactgcatttaggaaaacattctgaaatagaagagctaaactctccgggtgtgatggctcattcctgtaaaggaggccaaggcaggcagatcacttgagatcagcagttggagaccagcctggctaacatggtgaaaccccatctctactaataatacaaaaagctgggcgtggtggcgcaggcctgtaatccccgctaccctggagaccaaggcaaaagaaacgcctgaacctaggaggggggtttacagtgagcagagactgcaccactgtactccagcctgagcaacagagcaagactctgtctcaaaaaaagaaaaaaaaatagctaaactctaataatactgttctaaccaacttgagaaaaaggcaaaacaaagatgccaaacgtggaatgtggtgcccaagtattaaagtatctactatccctactttttcgtccttcatgagcagcccgagtgtactaaacacattactgttacttttgtcatacaaagtttcaaacaccagtgagaatagtggaatgaaccacccttgtgctcctctagctttaacaatgtatacctgtctacttcctctcccaaataattttgaaggaaatcctagacattttatctgtagatgcactatatagctctttaaagacatctaaactctctttaaatctagagtctctttgtccccttgcagtgtgtttattggagaagctaagtcattgtcctggagagtttcccagtcttgattttgctgattgcaatctcatggcgtcattaagtgtattctcctgtatgctgcatttcctgtaaattaatagacctagagaaagcgggtgtgtgtgtgtgtgtgtgtgtgtgtgtgtgtgtgtgtgaagggtctcactgtatcacccaggttagagttgcagtgttacaatcagctcacgcaacttctgcctcctgggctccagcgatcgtcccacctcagcctcctgagtagctgccaccatgcccagctaattttttctctttttggtagagacggggtttcaccatgttgcccaggcttgtctcaaactcctgacctcaagcgatcctcccaccttggcctcccaaagtgctgggattacaggcatgagccactgcacccagcaagaagtgtggttctgccaaggcacagtggctcacgcctgtaattccaacactctgggaggatcctttgagcccaggagtttgagaccagcctgggcaacatagtgagaccccatctctacaaaaaaattaaaaatcagactgatgctgcccacctgtcccatctgctcaggaggctgaggtgggaggatcacttgagcccaggaggttaaggctgcattgagccaatcatgcctctgcactctaacctgggtgacagagcaagaccctgtcttaaaaaaaaaaaaaaaaaaaaaaacatggttcccaaccagcagcatcaaaatcatctccgatgttagatgttacaaatacagtcttcaccccagactctgaatcaaaaactgtggatagagtcaggcacagaaagacaaacttcacatgttctcacatatttgtgggagctaaaaatcaaaacagttgaattcctggaaatagtaaaaggatggttatgagaggctgggaaggggtagtaagggggtgaggggtaggtagggatggttaatgggtccaaaaaagaataaaatatagtatgtgatagcacacagggtgactatagtctgtaatttaattgtacattttaaaataaagactatataactggattgtttgtaacattaaggataaatgcttgagggtatgtctgtgtagtgtgggtaattaaaaagaaaaaataaaaatacaaaaaaatgcttgagaggatgaataccccattttccatgttgcgattgttacacattgcatgtctgtatcaaagtatctcatttactttatgaatatatacacctactatgtacccacaacaattttttttttttttttgagatagagtatcgctctgttggcccagccaactttttttttaaacaaataaattaaaactctgggccgggcacagtggctcactcctataatcccagcactttggtaggccgaggcaggtggatcacctgaggtcaggagttcgagaccagcctgagcaaggtcgtgaaaccccacctctactaaaaatacaaaaattagccgggcatggtgtcgcatgcctgcaatcccaactacttgggaggctgaggcaggagaattccttgaacccaggaggtagaggttgcagtgagccaagatcgtgctccagtatggggaccgagtgatactctgtctcaaataaatatttaaaaaataaaactgggtagagcgcagccataggtgttttttaaagccccttaggtggttctggcacatactaaaacttaagacccactattctagtggttttgtcaaattccaattttaaaaaaaaatttgaataggatgtgcaagtgcaggtttgttacatgcatatattctgtcggtgagtctgggctttcagtgtgcccatcaccacctttatttttgtttcaaaacttcttgggggctgggcatcgtggctcatgcctgtaatcccagcacttttgggaggctgaggtaggcagatgacttgagcccaggaattcaagaccagcctgggcaacatagggagaccctgcttctacaaaaaaatagaaaaattggccaggcatggtggcaggtgcctgtagtcccagctacttgggaggctgaagtggaggatcacctgggccctggaggtggaggctgcagtgagccgagatcacgcctctgcactccagcctgggtgacagagcaagactgtctcaaaaaaaagaaaaaacagaaaactacgtgggggcgagtgcggtgtcccacacctataggaagccaaggtgggaggagttcaaggagttgaaggccaggagttcaagaccagcctgggtaacttagcaagaccccatttgaacgtcttttttgtcataatggcaaccattgattatttttgcctagatacattaaaccatggacttgtggctttaaacatttatttcaatccattgcagctcgtcttatcaatgctacctttttatttttttcttttttgagttagggtctcactctgttacttaggctggaatacagtggcatgatcacggctcactgcagccttaacctcctggggtcaagccatcctcccacctcagcctcccaagtagctgggactacaggcacatgccaccacgcctggctaatttttgtattttttgtagggacggagtttcgccatgttagccaggctgcttttgaactcctgagctcaagcaatctgcctgcctctgcctcccaaagtgttgggattacagaggtgggccactgtgcctggccttctaatcaatgatacctaattctgtcttcggtcagtggaactcaactcaatttgtctcctgagtccttttgaaactattctaatcttgtcagtttcctcgctttctggtatggtaagatttccagcatcatgttgtacattttcagtccagatctgaaatcagtcatttctccaaggagccctggttttgttggaaatggtatttagcaaccagtctgggcaataagcaaattcattgccacttgtttggtcataggccttttcggtggacagagctaggaaaatattacctgattctccctctagccacacaaatcatgttaccttctggtcatctgaaggtcctctcttctccaagcggaaaccctctcaaccctgcctcagtcagtgccacagttttgaatctcctaactatatgttgtctttctgcactcttaatttgtgagtgccactctttttttttttttttttttctgaggcggagtcttgctctgttgcccaggctggagtgcaatggcgcgatctcagctcactgcaagctccgcctcgcgggttcacgccattctcctgcctcagcctcccaagtagctgggactacaggcacccgccaccacgcctggctaattttttttgtatttttggtagagacggggtttcaccatgttagccaggatggtctcgatctcctgacttcatgatccgcccgcctcggcctcccaaagtgctgggattacaggcatgagccaccgtacccggcgttgtgtgtgccactcttacagagtggtgtccactggtagacaaagcactccaggtttgctctaacctgctcaaagcagagcagtacatggcttccctgcctggatatatggttcctcagctgacttctgggccgtttctggcaaagggataagaggattaaaaggaaactgtttctctaagatcctgcagcctcttttccgcgccgtcagagggtttaaagcagataatgtgtcatcttgctctgaataatgagtagaggaagaaggaaaattcagagcctaactttcaatgtgattctagagtacacaacagcactataaatggaatgagtaaataaatacctcaaattatagttttcatccaccttgaccattgcctgcagacctagcagtaactcaagtccagacaacagtgtggctgtgatcataataagatgatcagtgctcactagtgttttcaggaagtttttcaggaagccctcgaaaagtatagcaccatgagtcatcatagtccaactcatattcagtaagcgtttattaaaaactttggccgggcgcagtggctcacacctgtaatccctgcactttgggaggccgaggcgggtagatcgcttgaggtcaggaggtcaagaccggcctggccaacagggcgaaaccccatcactactaaaaatacaaaaattagctgggcatggtggtgggcgcctgtaatcccagctagtccagaggctgaagcaggaggatcacttgaacccaggaggcagaggttgcagtaagccaagatcaccccactgcactccatcctgggcgacagagcaagactctgtctccaaaaaaaaaaaaaaaaatgccttaccagatgtgtggtagattacattactataagaaatatttattgtctcccttttctgcatttatgagtacttccctcacttgatgttggccaatggaatttagcaggcatgatctatttggtaggctgaatgatgccctcccccaccccccaaaaggtccacgagctaatctccagaacctgtgaatatgtaacttaacattgtaaaagacactttgcagatgtaattaaataacgttctggagatgtaattatctggctaggcccagtgtaatcacaaagggaggctttttttttgactctccagcctcccttataatctagagaggctggagagtcaaaaatcagaaaaagttggtgtaaaaatggaagcaacagtagattggagatgctctactgtcagctctgaagatggacggagccacggaacaaggaaacggattctccctaagggagcacagccctgccgactccctgactgggcccatgcctccctccctcccttgattggcccagtgaaacccatttctgacttttgacctccagaaccataagacaataaatttgtgttattaggttggtgtaaatgtaattgcagtttttgccattactttgaaaatattttaggccgggcgctgtggctcacgcctgtaatcccagcactttgggaggccgaggagggcggatcacgaggtcaggagatcgagaccatcctcactaacatggtgaaaccccgtctctactaaaaatacaaaaaattagccaggagtggtggcgggcacctgtagctccagctactcgggaggatgaggcaggagaatggcgtgaacctgggactcggaggttgcagtgagccgacatgtgccactgcactccagcctgggtgacagagcaagactccatctcaaaaaaaaaaaaaaaaaaaattttagaccaccaagtttgtggtaatttgttaccaaagctccagaaaaattattacaacacagctaaagccttaagacacacttgcacacctgggcttgctctcctgcatcccagctgtctccatgagaataatacacctcagccagcctgctggtccaagaggacaagagacaggctggccagagctgcctgtgagccttggccaccagctcgaagcagaacccagccagatcagccaacctgcagaaatgtgaaaagtaaaaatgtagtggtgtgtgctactcagttttgggggttagggacaatgatagctaactgatacggggtgctaggcaactccacatatgtccctgcaataactatacgtggtagaaactgttacccagcattttacagatgatgaaacaggtcaggtaaacccacatgcccaaagtcacacacaaggcagcattctgaagttcagtcgtttcattttgcctaaatgaatatgagagatatcttccatttttccatcccaattccctatccgcctgtctgagcctcaggaaactagcctcatgacttcctccacacacttccctgccctctggtttctgagtgggacgtggagagagggaggagatggaagttggggtctttattcccacagcaccccacccctacccccgcagacttaactaaggctggcagtggccttcaaccaaaggccatagtgtctggtgtacacagccctcttgttccaagtcccggtaaccactgcctccccttgtcctagcccctccgtcttacgctaaccattgtaatttttctacatcctgcccacaccattataaataagttaatgatttattgtgtcgtcttcaaattactgaagtggggagtgtgccttctgtttcctgttgtgacgctgcagataatagcaagtaagttaaacagtaagtaaatatttcctatttcagaggaatataaaacatcacacttagtgcttgcttcagcagcatatatactaaaattggaacgatacagagaagattagcatgacccctgcgcaaggatggcacgcaaatttgtgaagcattccatattttaattaaaaattatttaaaaaataaagaataaatatcgggggtagatatgcaggcaggacggggcaaagctctgaggggtagggtatgcaggtcagcattatctagttgcaatggttatgttgggtaatgggccacctggtggtctagctggaggcaacaaggctgtaaatcaattgttcattctttcctgagatgggacactctcaaccttggtttgatattctggatctcctaaggccagttcctggaattatttaaataaaaggcatggttaaacattaagagagcacagaagaacaatatagaatggctggactaggtgtggtggctcacacctgtaatcactttgggaggctaaggcaagaggatcacttgagcctaggagttcgagaccagccggggcaacgtagtgagaccctgtctctacaaaagaattaaaaattaggcaggtgtggtggcgtgcacctgtagtcctgtaggtctaaaactggcctgtttggagatttggttattatttcactctctcctgatttccttgaaggtttgataacaatcctggtttcaggctgggtgcagtggctcacacctgtaaatcccagcactttgggaggccaaggcaggtgtgtcacctgaggtcgggagttcgagaccagcctggccaacatggtgaaaccctgtctctactaaaaataacaaaaattagctgggcgtggtggtgggcgcctataatccccagctactcaggaggttgaggcaggagaattgcttgaacctgggagatagaggttgaagtgagccgagatcatgccattgcactccagcctgggtgacgagagcaaaattccatctcaaaaaaaaaaaaaaaaaaaaaaaatattggttttggcttggtggtgtagaacttcagcatttgtactccattttggtttggtccattgggtctaatgccagagcccagtccaaataatgaactcctaaaaattgtatttaacataaggaagggaaggaaggagatagagggaaagggggcatgagaaagaagggaatgaggccaggtgtgtggctcacacctgtaatcccagcactttagggggcagaggcaggaggattgcttgaactcgagttcgagaccagcctgggcaacatagtgagacctcgtctctttaaaaaaaaaaaaaaagagactgaagaagaaaggaagtagagagaaaggaaggaaagaactcactcttcatttgtatttcctggctctaggtttgctaaatatatgtgtatattctgacactttttaaaacagtaaagaggattttattcaggactattggaagaggggagagaggtctgcctcaaccaaacagcaagggcaagaagtggggatttatagccaacaagaagagtgaggggtcatggctgaaaaaataattagagcagacatcatgggtagggggattctagctaaactgaactcacaggattcttgctagaggcagaccaaggacttacatatcagaggtgaaggatcagaaacttgatcagatatgaaggatgggggataacttaacaggattcttattaaaactgggccaggcaggccaaggacaggagggagtggaggccaagtttggacaaggagagagccttttgtcagttttttaaatcactctttgagtatgagcctggggaactggagaattcatttttttctttttaaaatgtagatatgaggttttgcgacattacccaggctggtcttgagcttctaagctcaagcaattcgcccacctcagcctcccaaagtgctgggattgtaggcatgagctgctgcacctggctgagaattcaaaaacagtaaaaattagtaagattagagtactttaatgtggtgcttcacagtatacaacgttcttaaaatcagggccgggcacggtagctcatgtctgtaatcccagcactttgggaggccaaggctggtggaagtcaggagttcaagaccagcctggccaacatggcgaaaccccgtctctactaaaaatacaaaaattacccgggcgtggtggcgcatgtctgtaatcccaggtactcgggaggctgaggcacgagaatcacttgatcctgggaagtggaagctgcaatgagccgagatcacacaactccactccagcctgggagacagactgagactctgtctcaaaaaataatattaaaaaaaataaaatcagtaacctgaggatactggatatcaactcctgtgtccaatttatttcattaaccactttagtaaatattagaacactacacagagctgtatcatcaagttgaaccacactccaattttcagggcaactgctgtgaagtcaatagtagcagcatccccacaagcagtctgcaccattttcttgggccttgtttgaagccacattgcatacatcccacaagtctctactaaaaatacaaaacttaggcgtggtggcacaagcctgtgattccagctactcaggaggctgagctgggaggatggcttgaacccagaaggcggaggctgcagtgagctgagatcgggccactggactccagcctgggcaacagagtgagacgctatctcaaaaaaagaaaaaagaaatgccgtttagctcttccctgtttttgcacataccagcagtagaacgaaagtctcacatagttagcttaaaaattaataataataaaatcagtgggcactgtagcatgcacttgtagtcccagctactcagcagactgaggtgggaaaattgcttgaacccagaagtttgaggctgcagtgagctgtgattgcaccactggggacgccagcctgggtaacagagtaagactttgtttctttacaaaaaaaaaaaaaaaaaaaaaaagtctgcagctccatagtctaattgatagaaacaagaattaagttcctacggcatatttggcatattcctggtaacaaaaacatcaccaaacttctaaacaagatcaaaacacttctaatattaaacactgaaataaatgtgagctacacttaccttttacaaagattaatagaaacgagaataattgacccaatttttggttaatcagtgagtgagggcggtcgtcgtggtgatgggttaaatcacggaataaatgttcgtaaagcaaaaattttcaggagcacgtcctcctgctctacagttcaaaaataagaaccaatctggcaggctcgctgagcgtttttggatcacgtcatttattgtcctgcatttgtatgattatcatatactgtatggattttttattttacagtaatttgtattcactaattttcattcattccgtttccaagctgcttattccaattcagggtctcaggtggcagcctgtcctagcaactcaggacgccaggtgggcgtccccccagacagtatgctgtcccatcacagagcgcgcgtgcacacacacacacatacacacacactcaggaaccatttagacacgccagtccacctaaagtgcacatccatgggatgtgggaggaaaccaggatacctggagaaaacccacgcaggcatgaggagaacatgcaaactccacacagacagtggccctggctgggaatcgatttgttttctcaacaacgttataacaaaaggatgttgagtgtaatgatgttatttgaggacttgctgtaattaaccaactggccagtcgactgcatctttatagttactattattccatgtgcaaacaggagatccaaagaaggagagaagggttagaaatccatttttttcttatcaaaatatattattttatccatttcattacagtcttttatccatttcattacagtctttcctgagcaaagtggaagttcaagtcaaaagtcagatgaaagtcgctttaaagttcaaagaggagaagaaatgaacttttcttttgagagcctcttttgtgccaggtgcttgccccttgctatgagaaatgtcaagatctttgcatctattgaagtacagagtaaaaatttttttaaaaacgcaaagatgaatacgatgagagtttgtgacctcatgccacataccaaatcaggacaaggctatcagtaatagcacctgagattctccgggctagaataaacctccatcatcatcttgttctatcccttatctgatactcgagtcagctcttgcttcttcatacccagtctgcctagcttttttttttttttttttgacaggttctcactctgctgcccaagctggagttcagctgtgcaatcttggctcactgcaacctcagcctcctgggcttaagcaatcctcaggcacacagcactacgcccagctaattatcttctgtatttttttgtagagacagggttttgtcttgttgcccaggatggtctcaaactcctaggctcaaatgatctactcaccttggcttcctaaagtgctgggattacaggcatgagccaccacacccagcctgcttagctgttttaaaataaaaactttagacaaattaaatgtaacagagtttaattgagcaaagaacgatcggtcaatcagccccctaaaccagaataggttcagaaaaactccagggttgctgcatggtcagagaagacctatggacagaaataggaaagtgacatacaaaaaacagaaatgagatacagaaacagctggatgtgttacaacttggcatttgccttatttgaacacagtttgaacagttggccgtctttgattgaccaaaactcagtgattggtatgagagtgggttacagtctgtttacacattcagctagaatatacttcactatgtacagagaaatccttaggctgaatataaggaggcagatttaggctaaacttaatttaacagttccccgcttttggtcaacctctcaaaactttaggcattgatatcattctgtcatcattgtaaatgtacttatttggtctcaaatcccacttggaaacagcagaacagtgagttttgtgagggctttagattaccttttggtaagggttagagtagaggggatctccttgtgctaaaatctcctattttctattctacaatctcttggtctgttttaggatctatctgcttctttaaagttttagtttgattattttgcatttagcatgaatgactccattttggtgtaatctgttctggtctgttggggtctagtacatgagctcactccaaacttatgacttgctgccatcattttgtttaaaaaccctccccttttagttaagctctcacttaggaatgtgaccaaaactcagggctttagcagcaatctcagttaccatcatctgggtttctagtttcaacacaaaacttacaggttacagtgtcctcatggttatgttgtttaaaattttgttgttccagttgaagagagaccatatgacattctatgatggctgtgtgcaaacacttaaaatttttgagagaatacagtgtaccagggagaatactattattaaaatgactatcaggaagataatatcaagagtttggagtatgtgccatagagtccccatgaaccaaaccaacaaaaatcaaatagatcaaagaatgaactagatagagtcgattcctttcaaccaagcgtgaaattaattataggggatttgttaattttctataactgaacctctgtaatacccaatgtattcttctatgtacaagaagtgtcagcattgtgcacatgtaccctaaaacttaaagtataataataataaaataaaataagaaaattattaaatgcttaacaagtaataaaagaatttaaaaatgaaaaaaaaagaagtgtcagcaactgcacagatatttctctattcagccattaagtaatctaaagcaattctattatctagcacaaccttatttattcaatttttttgaaacaggatctcattctgtcactcaagctggagatcataactcactgcagcctcaatctcccaggctcaagtgattctcctgcctcagcctctcaagtagctgggactacaggcacgtgacaccatatttggctaatttttgtgtttattttttgtagagatggtatcttgctatgttgcccaggctagtcacaaactcctgtgctcaagcaatccgctggcctctgcctcacaaagtgctgggattacagacatgagcccagcctactacaacttagcaaaataaattaaagtctgttgtctaacgaaaacctttgtagtagaatctgttatagagactattataagggatacatttctaattattgcctcatttactccaaaccatagaaaaagagatctaacaagtgatgcccatctagaagactgaagcccccctggcgatgttttctttttcttttttcttttttttttaagaagcagtgaaagtttttcaaaaagttttagagcaggaacgaaaggaagtaaaatacacttggaacagggccaagcaggcaacttgagcaatccaagtgccctgtttgaccttagacttggggttttatacactagcatgcttctggagttttgcatctctcctcccttgatttttccttggggcaggctgtccgcatgtgcagtagcctgccaacacttgggagggggtgcatgcatggtgtgtttactgaagcagtgtgcatgctcacttgagacattttccccttaccagccgagtgttcctagcgaaaggtcgtgtaccagttaaactccaccattttgcctcttaatgcacatgcttagacccactcgcccaaattctgagatcttagtgggaagctgcggatcaccagcttcaggtgttttctatctattgggagattgatttttccttgatgccagatgtgaccaattattattttagagagacagcttaacaactgcctgaccattacctgatggttgccttgagatggtacttgttcccttgaccttgaaccccttgtgggcaggaactggagtggctcatttcactcagcttgcagtctgtggacagctaagtgttaacagctcagcgaagggtcaggctgattgcctcctgtacctgccgcaatgtattctttaatctatgatgtaggttaagagtggaccagtgttctgtttctgactgattatgatgcaacaaatgtaccattaaaatttctcaccgacattggccctgtatcttccatctatcaaggcatgggattgtccatgtataagataggctgcaaaatcctccacaaataaaagtataccccacgggtgcacacaagaccttttttccagttctattgttcatagaggcataagtaagggaaaaattaggagaagtaagaatctcatgatgacagaggaatgttgatccctgattttgggaaagctgtccacatctaggatgtcgtctgcttctggagagaaccttctctggttagctttaccttatgttctccgataggtatacagttctggaggggctcttctgagttgcaagatcacaaacccaaagctcaaagtcacaaagttttgctgcagtgtgggtggcaagtgcaatttttctctgatgttgtttccaaaagtctcaatctctgagttctagatagtgaagtcttcaactgtccttagtcagtggatcatgaaaagtttcctttacctggtgaaaatatactttggcagaatgcatttaaagcattgaaaggctgggtgcagtggctcacacctgtagtcccagcactttgggaggctgaggcaggaggattgcttgagctcaggagttggagaccagcctgggcaacatggtgcaactgagtctctaccaaaaatacaaaaattagccgggcatggtagtgtacgctcgtggtcccagctactgtacttgggaggctaaggtggaaggatgacttgagcccgggaggtggaagttgcagtaagccacgatggtgccactgcactccagtgtaggcaacaaagccagaccatgtctcaaaaaaaaaaaaaaaaaagaaaagaaaagaaaagaaaagaaagaaagaaaaagaaaaaggaagaaagaaagccttgtagcatttagtcacatcagagattaggagtggaagatacatgcgattctattatttggagcatagaccttttagtgactatttcatatggggtcaactcatgttttccactgaaagtggatctgattgttatcaattcctaatgcctttgaccaaggcaatacagttgatttagttagcgtttccagatattattgtatctgtaataccttatttaaccattttacaacttgtctggtgaaacaagtacctccatcactggagatttctccagtaatgtccatgagagaaacacatttcctaataaccttttagctactgttagagcatcagcccgcttacacgggaaagtttctgtaaagccagaaaacatacattgaaaatgacaattgaatgaagtccatctataaatgtttaaatagcccatcaggtagcagaaatatacctgaaattttgattgtcttcccaggattataggtttaacaaaccaaacactggtcataaatttattttagcaatttagaacagtcatcaaattttatatatatatatgattcctgtttggataattttatctcttccatgaggagtcatggagcacagagcttttaataacggaagctttaaggactcaggaaggactagacaaccatccgggctctctatgaatccatgcttaacattaggtttatatcctcttaaatactgattttgtttccccaagtcagatgtatagcactatttgttagatgggttatcataggtaatttgtcttggaccatgggttcattcaaattgcatatctaaacaatttccggactgtctgatttagcatgaaaatctgggaaactattgtcttggtattcaattaattcctctcttgcttgggtgagcagttttatcagtcagtctctttattacagttctgggaattcttacccagtccaaatgatatgattgaaaacttaccagaaacctgtagttaagagtgcctgtcaggaaaaaaaagtgcttgtcagggtcttttttactttttccatgaatctccttgaagacatgatactctaggattttacttcttgagaagagttttcactttatttttaattttttatttttttgagacagggtatcaccctgtcgcccaggctagaatgcagtggtgtgatcacggctcactgcatccttgacctcccaggtttaagcctccctggtagctgggacccacaggcatgcaccaccacacccggctaatttacttttattttttgtagagacaggatttccctatgttacccaggctagtctggaactctcaggctgaagcgattttctgaccttggcctcccaaagtgctgggattataggtgtgagccaccatgccagacaagaactttcagaaactgcatcagaattaagcaattaactatagaaccaacttaattgtcattgttaaagacacaattgacaaatttgttcatttctgtgatctgcagtaatttaacataactataattatatatataaaaaaccatatatatatatatatataaaaccctatatacacacacacacacacacacacacatccagacatatcagaatttggggaatcttatacaattttggaacatatgttaataacattcataaaaacaaaactcaaagttaaacatcattactttttcctttttatttgtttatttaaaatagagacaggatttccccatgttgctcaggctgatctcatactcctgggctcaagcgatccacacttgcaaagttctgggattgcaggtgtaagccaccacgcgtggcctaaacattatttcttatttgacaatgcttcccatgtaatttaacatatcagataagcccttttattatctttcttctgaatgccgcaaggaccctatgatacatcccaaagttaatggtaaaataaaagagacaatttttaatttgcaatttggtttggagaagcctgtcaaatatgttaaaggattaaaagaccttatcaaaataggatcactggtcactgtgataattcagattttaaaaagcaaaaacctttactctttgacagagagaagactccattttccaaacaatcaaaagacctaaaggagaatagcatgagacagaatctgtctctcctgccctttcttttttaaaaaaatttttgcagtttactcaaaaggtgagcaaaaatattttattgtattttattaatactgcatgcaatttttgtttaaaagagaaaaccaggctgggcatggtggctcacacttgtaatcccagcactttaggagcccgaggcaggagaatcacttgagcctaggagttggagaccagcctgggaaacatagtgatatcctgtttctataaagaataaaaaaattggctaatatggtgttgtgtacctgtagttctagttactcaggaggctgaggcaggagtatcacttgggcctgggagttcaaagctgcagtgaggtgtgatcgcaccactgcattccagcctgagtgacagagtgagactctgtctccgagagagaaaaatcagattttattactattattttaacatacaaatataaaatgtggcctgtagtccaagctaattttttttatttttgtagtgataggatctcactatgttgcccaggccggtctcaaattcgtgagctgaagcagtcctcctgcctcagcttcccaaagtgctgggattacaggcatgagccactgcacccagcctcacatttttctttattagcaaatctaaatatatttagcttgtctataccatataaaaaataagatgccaaagcatatcaacttaaacttatgtttaataattaatgtttggtattttaatttatttataaatgactcagacattttatgattattaatttaacataacatgactttaagattttagattactaaaaataattttgaaactctaacacaggtaccctccctaatgtcttccccagtcatcttgggtctcaagtagccatgtggcacccaggatggctaaagagggcagggttcctctgggtccagaatttatatgccaagtttggagctcgggacagaaggcaggtctgtgaaaatgatgcctagaggatcaaacccctcccagaatagccaagaggcaaagatggaccagggaggaaggggcctatattgggcttgattctgccttgtagctagctggtggtctaggtgctgaaaacgtgtccctaggtcttaatatggccacctgtccggattccagaatccaaaagctcaaaaccaaaaacaagctcacagacaaatcaagcaagtatcaaaaatattatagaagcagcagttttatggcccttaaaacatgtattggagacagcataaacctgtttaaccagtagacccaggcaacaatttctgaattatatttaactgataattttgaagtcattgctattatatcaataatttaaaaaccagcttaatttaccaaatattatcacgtacacacaacccatatagacatatagatatacatacagaaagcgatcttaagctttcataaagaatttgtattttctggcttttaaataattttttcagccaagcatggtgcctcatgcctgtaatctcagcactttgggaggccagggtggatggattgcttgagcccaggagtttgagaccagcctgagcaacatggtgaaaccctatctctactgaaactacaaaaattagctgggtatggtggcacatgcctgtagtcccaactacttggcaggggttgaggcagaggatcacctgagccttcagaggccaaggctgcagtgagctgtgattgtaccactgcactccagcctgggcaacagagcgtgatcctgcctcaatataaataaataaataaataaataaataatttttccccactcagacaatcgatcttccaattacctgtttcattgctcaaagcaattgttcactaggcaataatttgccttctgaaaagatgactcagccaggcatggtggctcatgcctgtaagcccagctcttcgggaagctgaggcaggtggatcacatgaggtcaggagttcaagatcagcctgaccaacatggtgaaatcctgcctctactaaaatacaaaattagccgggcatggtggtgcacacctgtaatcccagctacttgggaggctgaggcaggagaatcacttgaactcgggaggcagaggttgcagtgaaccaagattgtgccattgcactccagcctgggcaacaagagcgagacttcatctcaaacaataaaataaataaataaataaataattattcagtgaagacacaaagtttatatctcaaaagcacagagctgagacttgaggtctaaacattgtaccatcatttgtcaaaaccaaggaaaaagggtgtgaaggcccaatttaaaaaaattgggaaggaaaagcaccttaaacaaagcaaagacttgttatgtaaatttaaaacaatggtaagagtttttagtgactcagtcatccctctcagaactcttacaaatgaaaattttcattatagatgtaaatttattttacaaaaatgttttaagatggccagctaaatgtcagaaaggtgtattttggagagggatttagttcaataggtggtctttttaatgtagctactgtttcttagctaaatttactgagttatttctccttctctttgcacattataaaaaaatgaaataaaataaaataaaactactgagttctgggtgaagcccattcaggaattgggcaaagaaaggatttgctatgcatgagcccagcatggatatctctgaaaaggcagcaaacctactttacctgagggcataactttttaattttttttttaagagaagaggtctcactatgttgcccaggctggtctccaactcctgggctcaagtgattcctcccaccttggcctctcaaagagctgggattacaggagtgagctaccatgcctagtcagagggcataccttttataaacactttatccaggatggtttcttttagcctttagggtggaatagtgtattagtccattttcatgctgctgataaagacatacctgagacagggcaatttacaaaagaaagaggcttaatggacttacagttccacgtggttggggaggcttcacaatcatggtggaaagtgaaaggcatgtctcacatggcagtaaacaagagaagagggcttgtgcaggtaaactcccctttataaaaccatcagatcttgtgagactcactatcatgagaacagaacaggaaagacctgccctcatgattcaattacctcccaccaggtccctcccacaacacctgggaattcaagatgagatttgggtagggacacagccaaaccatatcattctgccctggcccctcccaaatctcatgtcttcacatttcaaaaccaatcatgccttcctagcagtcccccaaagtcttaactcatttcagcattaactcaaaagtctacagtccaaagtttcatccgagacaagacaagttccttccacatatgagcctgtaaaatcaaaagcaagttagttacttcctagatacaatgggggtacaggcatttggtaaatacagccattccaaatgggagaaattggtgaaaacaaaggggctacaggctccatgagagtctgaaatccagcagggcagccaaatcttaaagctccaaaatgatttcctttgactccatgtctcacatccaggtcacactgatggtgggttcccatggtcttggatagctccacccctgtggctttgcagcttttgcacccctcctgctgctctcactggctggcattaagtgtctgcagcttttccaggtgcacggtgcaagctgtcagtggatctaccattctggggtctggaggatgatggccctcttctcacaactccactaggcagtgctccaatagggactctgtgtggcagctccaaccccacatttcccttccgcactgccctagtggagagtctcaatgagggccccacccctgcagcaaacttctgcctgggcatcttggcatttccatacatgctctgaaatctaggtggaggatcccaaacctcaattttttatttccgtgcacccacaggctcaacaccatgtggaagctgccaaggcttggggcttgcaccctctgaggcaacagcctgagctgtaccttggccccttttatccatagctggagagactggaacacagggtaccaagtccctaggctacacagagcaggcggaccctgggcccagcccacaaaaccatcttttcctcctaggcctccagacgtatgatgggaggggctgccatgaagacctctgacatgccctggagacatttttcccattgtcttggggattaacattcggctcctcattacttatgcaaatttctgcagctgatttgaatttctcctcagaaaatgggattttcttttctatcatattgtcaggctgcaaattttccaaggttttatggtctgtttcccttttaaacttgaatgcctttaacagcacccaagtcacctcttgaatgtgttgctgcttagaaatttcttccaaaagataccctaaatcatctctctcaagttcaaagttccacagatctctagggcagaagcaaagtgccaccagtctctttgctaaaacataacaagagtcatctttgctctagttcccaacaagttccttatctccatctgagactacctcagcctggatttcattgtccatatcattatcaacattttggtcaaagccattcaacaagtctctaagaagttccaaactttcccacattttcctgtcttctgagccctccaaactgttccaacctctgcttgttacccagttccaaagttgcttccacatttttgggtatcttttcagcagtgccgcactctactggttccaatttactgtattagtccgttttcacactgctgataaaaacatacctgagactgggtaacttacaaaagaaagaggtttaatggacttacagttccacgtggctggggaggcctcacaaccatggcagaaggtgaaaggcacatctcacatggcagcagacaagagaagagagcttgtacaggaaaactccccttaataaaactatcagatctcatgagacttactcactatcaagagaacagcacggaaaacacccccctccatgattcaattacctcccatcaggtccctcccacaacccgtgggaattcaagatgagatttgagtgaggacacagccaaaccatatcagatagtaacaaagtgaaaattagcaaatttaattttttttttattttaacaaaaaaaagaagaagaagaagaaaagagtctcactctgtcacccaggctggagtgcagtggcacaatcttggcttgctgcaacctccgtccttcggttcaaatgatttttgtgcctcaacctccttagtagctgggattacaggtgcctaccaccatgcctggctaatttttgtatttttagaaaagacagggtttcactatgttagccaggctggtctcaaagtcctggcctcacgtggtcttcctgccttggcctcccaaagtgctgggattacaggtgattacaggtggattttattttttaattaattaattagtctcttaaggtttttttatttgcctttcataaattcttttaaaagagccaataacaatactgaatctttttaaagacttttgcacatcaatagacatccctggagccttctttttttttttttttttttttttgagaggggtcttgctcagtcgtccaggctggagtgcagtggcgcaatctcagctcactgcaagctctgcctcccgagttcacgccattctcctgcctcagcctccagagtagctgggactacaggcgcccgctgccacgcctggctaattttttgtatttttagtagagacagggtttcaccatgttagccaggatggtctcgatctcctaacctcgtgatctgcccgccttggcctcccaaagtgctggaattacaggcatgagccaccgcgccgggctggagcctttatttttaaatgcacttcttaaagtgcagtgttgaaatgggagcgtcccctggtccccctcccaggacatgcgacaggggtgtggctctctgttcagccacagcaagctcaaacccctcatgggagcgggagcacacagatgggcaggtgcaggaaccggagtggacacttttgggcttcagccccacggcagtgtctaggggtaactctgtgtcaaaaaattcctgtaaatctctgaaagctgaacttcttactctctgaagtattgccatttactgccagttttctatcatgacttctgaagacagcttggatcaaaaatttgctcaaagaaacttagatagctagaaacccaaattcatggggctttggaatctgagagcttacccacaatccccagttgctgtgagagaggaatggacaaaacaagtccagcacgtcactcatttcgtcactcgacgctcctgggagaccctaggagctccactttggttcctacttctgacaccaaattgttctttgcttaattaatgtttaattggtctaaagttaaatgaaaaactgtagacaaattaaacagattaattaagcaaagaacaatttctgaatcattcagtcccccaaaccagaaaaggttctgtggctgggcgcagtggctcacacgtttgggaggctgagatgggaggatcactcgagcccaggagttcaagaccagcctgggcaacatagcaacatcccatctcttaaaaaaaaaaaaaaaaaaaaaaaaaaagaaagaaagaaaaacaggataggttctgagagtttccagtgctgccgcatggtcagagagaatttatggacagaaaaagcaaagtgaggtaaagtaacagctggattgcgtacagctttgcatttgccttatttgaacacagtttgaacagttggccatatttgattggccaaaactcagtcatttggtatgagggtaggatgtagtctgtttacatacccagttaggttatagttcactatgtacagagaaacatttaggctgaacttaaaatatgtaaggaagcagatttaggctaaacttaattttaacagcttgcttatctatttcagtatctagaattccacaatgccttttttttttttttttttttttttttttttttttttttttttttgagagtctctcgccctgttgcccaggcaggagtgcagtggtgagatctcagctcaccacaacctctgcctcctgggctcaagcaattctcctgcttcagcttcccacgtagctgggattacaggtgtgcaccaccacacctggctaatttttttatgtttagtagagacagggtttcatcatgttggccagactggtctcaaactcctgacctcaagtgatccacctgcctcggcctcccagagtgctggggtaacaggcatgagccactgcgcctggacccacagtgcatttttaacggacctgagttattataaagggctttgctgtactgagccgtggctgtcacaccatcatctgtttctttgattcctctgttcctcattcatgcatcctgtactacactaggcaagacagataaagagcacagatccccaggcttcagcagcctgtgctttcaaacaaggcaatacagcatcttcagtatgagtgcaggttctggagccaaagtctggttttactacccacatttaatctcactattaaatgaaatttatgggaagccattattttggactgagcttctgcaatgggccccaacagaaaagatcaaaccaaaatgaagttattgatgctaaagttatttgtcaccaaaccaaacaactaaactggttttctgatcttcggagaagtcaggagagaaagatgacagccaaatccctaaactggccagttttggtctacataataaggaaattccctatgctttagtctttataagaaaagtaacctgaaggtaactgatctgctttttgtattatgctatttccttgtttttgctcaaactatcttataaaaactgatctgtcatgcccaatggaacatgaaatctttagaggagacactgcccaatttatggttcactaataaaagccaattagatctttttttttttttttttttttgagatggagtctggctctgtcacccaggctggaatgcagtggcgcaatctcggcttgctgcaagctctgcctccggggttcgcgccattctcctgcctcagcctcccaagtagctgggactacaggcgcccgccactacgcccagctaattttttatatttttagtagagacggggtttcaccgtgttagccaggatggtctcgatctcctgacctcgtgatccacccgcctcggcctcccaaagtgctgggattacaggcgtgagccaccgtgcctggcctcttttttttttttttaagacagtcttgctgtgtcacccaggctgaagtgcagtggcacaatcttggctcactgcaagcttcacctcccaggcttaagtgattctcctgactcggcctcccgagtagctgggactacaggcatataccaccacccctggctaatttttgtatttttagtagagacagggtttcactatgttggccaggctggtctcaaactcctgttctcaagtgatctgcctgccgtgacctcccaagtgctaggattacaggcatgaaccactgcgcctggccacatctttaaactaaatttgttgaaattttgttttttaatgtcactaaactgtaagaaagagaaaaccaggagctggcctgtcagtcactgccaggccttggtgttctgtggaacatacatgttttcacagaataacaacattggacaagactgctgtaagaccacaatggaacaagacaaaagcaagtctattccccaatcatgtctgagcacaaacaaaaccaagaacatgtctaaacctcaaaaggaccaaacatacccttaggctggctgatatgagtcacaagctgtctttaccaattataggtatatctctactctagatttcctgccttctagcaaaaacattattaagattccacgtcatagtactcgtacctttgcttcctgacgacactcaatccagagcaaagctctgcttccctgaaccctctccaaaatgatcttacagaagccatatttgccatttttaattaattaatttatttatttatttattatttatgagacagagtttcactctgtggcgcaggctggagtacagtggcacgatctcggctcactgcatcctctgcctccaggttcaagtgattcgtctgcctcagcctcctgagtagctgggattacaggcacctgccaccacatccggctaatttttgtacttttagtagagacagggattcaccatgttggccaggttggtctcgaactcccgacctcaggtgatgcccccacctcagcctcccaaagttctgggattacaggtgtgagccaccatgcctggtcagtatttgccatttttaatacctgtattttgctgggatatgcctcacaccagctaacccaggatgtgcatgtttctggaagtccttgagaagaaccttcgatgtgctataatcctaagggtaacttgcctgcattgctccctagtggtctgaggtttcagctgagatagtgagggtggagaggggcgggtgtgatagtgatggaaacacaccccatgtagatcagaggcagcagaagagggcagggagaaagttgagacctggctttgctgtatactactttgtaaggccctgaccaaggctggtgatctctctgaaccttgtagttcttcctctaaaatggagcttccttcttcaggggactggtaagaattaaaagcacaaagtacataaaaagctttgtagaactggactctttttcctggatcctggtaccaaggcaggatcatgactttcccaggacccttagcaaaatgtcctatttaacttttttttaaaatgtaaaccgatttttaggtagggtgtgctgtctcatgcctataatccaagcattttgggaggccaaggcgggaggctcacttgaggtcaggagttcaagactagcctgggcaatatggcgagatcctgtctataaaaaatgaaaaaatcagccaagtgtggtgatatgtgcctgtagtcccagctactcaagaggctgaggtgggaggatcgcttgagtctggatgtttgaggctgcagtgagccatggttgtgcctatgggctccagcctaggtgacagagtgagatcctttctcaagaaaacaaacaaacagataaaaaacacacacacacacagctgctactctggttgaagtaggggaattacttggaattctccctccagggaccaccacccccttacatgcatcctttttttcttttatgtccctggggacatagcccaaaagttcctggtttatacattgtgctattcaaaatgctgcagtctcccacaaatgaaatctaattccgtacacgtcattaggtctcatagatccaatcctgttatgtaaaagttgagggagttacacagtccttttatgaaacaagaatttgtcaaatcaaatgttgcttcagtctttgcagtggccctggctgccacgagattcaccctgcagtacaaagtgctccagaaaaccacttacatgagctgagcctcctgagctgccacgagcttctggggcacacacttcagaaacatcctcatgtgctttgcactcaccccctgcttctgttgttttggtgattgctgcacatacattccaaaaagaatcacttacatgtgttacaggaaaggggtcctgatccagacccccaagagagggttcttggatctcatgcaagaaagaattcagggcgagtccacagagtaaagtaaaagcaagtttattaagaaagtaaaggaataaaagaatgactactccaggccgggtgcggtggctcacgcctataatcccagcactttgggaggctgaggcgggcggatcacctgaagtcaggagttcgagaccagcctggccaacatgacaaaaccctgtctcaactaaaagtacaaaaattagccgggcgtggtggtgggcatctgtaatcccagctactcgggaggctgaggcaggagaatcattcgaacccggcaggcagaggttgcagtgagctgagattgcgccactgcaccccagcctgggcaacagagcaagattgtctcaaaaaaaaaaaacaacaacaacaacaaaaaactgaccctactaagggctgctgcttgcccatttttatggttatttcttgatgatatgctaaacaagggttggattattcatgcctcccctttttagaccatatagtgtaacttcctgacgtttccatgacatttgtaaactgtcatggtgctggtgggagtgtggcagtgaggcataccagaggtcactcttgtcgccatcttggttttggtgggattttgccggcttttttactgcaacctgttttatcagcaaggtctttatgatctgtatcatgggctgacatcctatctcaccttgtgacttagaatgccttaacagtctgggaatacagcccagtaggtctcagtggcattttacccagcccctactcaagatggagttgctctggttcaactccattggacgagatttacctccattggatttacctctccaagttgccacctgtaaccctaggatcagtattatgacatttacatgaccaaccttcccaatgcctgcacaatttgcctattctggaaaaacttattttaattttttgtttcctgtggggtttctttctttgttcttctttttttttttaagtgagtggttacttctaatgtatatgtatcaataacttttatcagcttatctcagtatacagtgacaccatgaaagtgaatgtgaatgccaggcacttcataagagaatcagttacttgaccaactgtattagtcagggttctccagcggaacaggaccaataggatatatgtatatataaaaaagggtttattagggagaattggctcacattgattacaagacaagtcctaccgtaggctatctgcaagctggggaaaaagagaaggtggcagcctggctcagtccaagtctgaaagccttaaaaccagggaagcccaagtgtagccttcagtctgaggctgaaagcctgagagcccccaggatgctgctggtgttaagttccagagtccaaggcccaacaaactgcagtctgatgtccaagggcaagaggagaggaagcaagcattggcacaggaagacagagagagcacgctagaggacatagccagctgaatatcccttcttctgcctgctttgttctagctatgctggcagcccattggatggtgcccacccacattgaaggtaggtcttcctctcccagtccatttactcaaatgtcaatttcctctggaaacaccctcacagacactcccaggaggtgtttcaccagccagctggcatccctcaatccagtcaagttgacacaatattaaccatcacaccaactttgttgttaccttgtatgctaggcagaataatgatcccccaaacatggtcacattctaatccctggaacctgtaaatatgttatgttttatggcaagacggaattaaagttgcagatggaactaagtttgctgatacactgagtttaaaatagggagattctcctacattatttgggtgggcccaatgtgagaacaagcatccttaaaagatgaaaagagaggccaaagagtgagtgtcatagtgatacggtgtgagaaaaacttgaccagcaattgatagcttagacgatggagaaaggggccacaaaccaatgaatgtagacagcctcttgaagctagaacacgcaagaaactggatcctctcctagagcctccagaaaggaatgcagctctgctgacaccttaacgctgagtgagacccattttggacttctgacctccagaactatgacataataaacgtatgttaggtgttttggccagacgcagtgactcacgcctgtaatcccagcactttgggaggccaaggtgggcagatcatgaggtcaggagatcgagaccatcctggataacacggtgaaacgccatctctactaaaaatacaaaaaattagccagacgtggtggtgtgtgcctgtagtcccagctactcaggaggctgaggcaggagaatggcatgaacctgggaagcggagcttgcagtgagcagagatctcgccactgcactccagcctgggtgacagagcaagactctgtctcaaaaaaaaaaaaaaaaaaaaggtatgttaggtgttttaagccgctaactttctggtaacttgttacagcagcaatagaaaactaatacagctcgatttttttcattgggttcctcagcatcattgtaagacatgaattctaagggtgtgttgagagcaaggttcagatatttagcagagtaggagaaaaggaaataatcgaggctctggccctcgccgacacaaattttcctagtggatatagacctattttttcacaaacgtaagtgcaacagtaaatttccaaagccccgtagaaaatttgtcagtctctgatgttctgaataacatacagccatacccgcactgtaaagttactaatctccctccccatcccttgccatactgtgctctttcgaaggaagtcactctgtgcaacccgcacttgaggagtggtgctacggtttgagtgtccccttccaaactcatgttgaaatttcattaccaatgtaattaagaggcaggaccttcaagaggtgattaggtcaggaggactctgccctcatagtggattaatgctgttatttcaggagtgggttagttatcccaagagtgggttcctgataaaaaggatgaagctgaccatcagctgaataagatatagttccagctacttgggaggctggagcaggagggttgcttgagcctaggagttcaaaaccatagtgtgctatgattcttgtgaacagtgattgtactccagcctgggtaacatagtgaggccctatcttttttttttttttttgagaaagagtcttgctctgtcactctgtccctaggctagagtgcagtggcgtgatctcggctcactacaacttttgcctcccaggttcaagtgattctcctgcctcagcctctcagggattacaggtgcctgccaccacacctggctaatttttttgtatttttagtagagacaggggtttcaccattttgaccaggctggtcttgaactccttacctcagatgatccacccaccttggcctcccaaagtgctgggattacaggtgtgagctactgtgcccagccacaagaccctgtctttaaaaaaaaagaaaaaaaagttgagtttagccaaatttcctctctttatccatgttcacttgcccttctgccatgttatgattcagcacaaaggccttcactagatgctggtgccatgctcttggacttcccaggctccagaaccataagccaaataaacttctattgtttataaattgtccagtctgtggtattctgttatgcaccagaaaacagactaagacaggtggggaattatgcttccttttctttagggtggagtatctaatccctttgcattggaatccctctgcatgagagatttgtctcatctcccgtatttattattcaatctttttatatcaatatggactcctgggtatttattttattctttagcttataattcaatattactttattttgttgtgcaaattattccagtgtcagccatttggagcacttgttgtttcctttgcccctttgattaatgcccatcattgtgttttgtttttcttttcatttctggcactataagataaatcctgtgtatatttcatctcaaacattgtattttttatatctagaagtttaatttgggtcttttaaaaattatctccttttttttttttccaagatggattcccactctgtcgcccaggctggagtgcagtggcacaatcttggcacaacctctgactcctgggttcaagcgattctcctgcctcagcctcccaagcagctgggattacaggcgcccgacaccatgcctggctaatttttttgtatttttagtagagacagagtttcgctgtgttggccaggctggtctcaaacttctgacctcaggtgatccgcccacctcggcctcccaaagtgctggaattacaggcatgatccacaatgcccagcctcctcttctggctgggcgtggtggctcacacctgtagtcccagcactttgggaggccgaggcaggtggatcatgaggtcaggagatcgagaccacactggccaacatggtgaaaccccgtctctactaaaaatacaaaaaattagctgggcgtggtggtgggcgcctgtagtttcagctacttgggaggctgaggcaggagaatggcgtgaacctgggaggcagagcttgcagtgagctgagatctcaccactgcactccagcctgggcaacagagcaagacttggtctcaaaaaaaaaaaagtatcttctatttctctacttaacatgttcaattcttcctctagcttcttcagcatatggaatatagttataataactgtttttaaaaccttttctactaattctttcatctcctccttacaggtcatattttcctgcttctttggaagcccggtaattttttttttcacagggtctcactatgttgcccaggctggctttaaactcctgggcttgagtgatcttttcacctcagcctcctgattagctaggactatagacatgcaccacctcacctggcttatgcctagttattattattattattattattattattattattattatttgtatcagattcttgctctgttgcctaggctggagtgtagtgtcatgattagggctcactgcagcctccaccttctgggctcaagtgatcctcccacctcagtctcttgagtatctgggactataggcacgcaccaccatgcctggctaatttttgtaatattttgtagagacggggttttaccatgttgcccaacctggtcttgaactcctgggctcaagtgatctgccccttgggcctcccaaagtgttgggattataggtgtgagccaccacccctggccaaattttttaatttttttgtggagacggggtcttgccatattgccagggctggtctcaaactcttcggctcaagcaatccttccgccttgccctcccaaagtgctgggattacaggcatgagccactgtgcccagcatgcctggcgatttttaagtggatgccataatttttaccttgtaggatgctggatatctttgtatttccaaatattcttaagctttttacctgggatgtgattaacataattgaaactagtttgactctctcttgggtcttattttaaaactttgtctttttaaacttttaaactaagaccagagtggtgttttgtgtaggcttcatgtttccccactagcaagcactcagaactctccctgattgcctgtgagttatgaggttttccacttgggtggtggaagctataggaattgttgtctttaaccctttcagcctgttctttcctcaggctcaggtatttatgtcacacatgtgctgattagtacttaactgaatactcaaggccagggctgtctgcagttctccagcattttctcttacatcgctttcctttctggtactctttcctgttgactctagctgtcttgccctcactggacttccagctccatctcctcaattcagtgagcctgctaggctccacctggattgccccagctgctaatatttctccagcaatcatggggatcgccttgattatttctcatctttcaagaatttctattctaccagcctaggcaacataaaataatttttaaaaatagcagggtgtgggccaggcgcagtggttcacatctgtaatcccagcactttgggaggccgaggtgggtggatcacaaggtcaggagttcaagactagcctgaccaacatagtgaaacccagtttctcctcaaaatacaaaaattagctgggcgtggtggcgggcacctgtaatcccagctacttgggaggctgaggcagagaattgcttgaacccgggaggcagaggttgcagtaagccgagatcgcaccactgcactccagtttgggcgacagagcaagactccgtctcaaaaacaacgccaacaacaacaacaaaatagctgggtgtggtggcaattgcctgtagtcccagctgcttgggaggctgagatgtgaggatcacttgagcccaggaggtcaacgctgcagtgagctatgatcgtgctactggactttagcctgggtaacaaagtgagactgtctctgatatggtttggctgtgcccccacccaaaatctcatcttaaattgtaatccccattatccccacagtccccatgtgtcaagggagagggggaggtaattaaatcatgggggtggtttcctccatgctgttcttgtgatagtgagtaaattttcatgagatctgatttttttttttttttttttttttgagacagagtctcactctgtcacccaggctggagtgcagtggcgtgatctcggctcactgcaagctccacctcccgggttcacgccattctcctgcctcagcctccctagtagctgggactacaggtgcccgccaccacgcccagctaatttttttgtatttttatagagatggggtttcaccgtgttagccaggatgatcttgagctcctgaccttgtgatccgcctgtctcggcctcccaaagggctgggattacaggtgtgagccaccgcgcctggcctgatctgatggttttataagaggctcttacccctttactgggcacttctccttcctgacaccttgtgaagaaggtgccttgcttccttcccctttgccttccactatgattgtaagtttcctgaggcttccccagccatgctgaactgtgagtcaattaagcctctttcctttacaaattacccagtcttgccaggcacgatggctcacacctgtaatcccaacactttgggaggccaaggcgggtggatcactaggtcaagagtttgagaccagcctagccaacatggtgaaactccatctctactaagaatacaaaaattagccaggcatggtggtgtgtgcctgtaatcccagctactcgggaggctgaggcaggagaattgcttgaaatcgggaggcagaggttgcagtgagctgagatcgtgccactgcactccagcctaggtgacagagcaagagtccatctcaggcaacaaaaataaataaataaattacccagtcttgggtttgtcttcatagcagtgtgaaaatggactaatacagtctctaaatacaaaagaaagaagaatatatcttttgttgcctggtggtcagtgtcttgagaaacatttgctatatgatttcccttttctcggttgtttcagtagaaagagtaaatctagtccctgttattccaacctggccagaagctgaagttcttggccccaacagtctttttttttttagatggagtctcactctgttgcccaggctggagtgcaatggcactatttcagctcactgtaacctctgcctcatgggttcaagtgattctcctgcctcagcctcctgagtagctgggattacaggtgcccgccaccacacccagctgatttttgtatttttggtagagacggggtttcgccatgttagtcaggctggtctcaaactcctgacctcacgatccgccctcctggtcctcccaaaatcctgggattacaggtgtgagccaccacgcctggccgacccccacggtttttttaaatgagtggctacttttacatatactagtcactttaatcagtttatctctgtatatggtaaaactattaaggtgactattaattctaggcactttgtaagaggtccttccaccactacctttcatcttgttttccatagcagctgcacttacattcccaccaaaagcgcacaagggttcgtttctccaaatccttgtgtaattcccattccttttaaaatagttttaacatatttgctttcgttttttgttcttgtttttgagagacaaggtcttgctgtgttgtccagtctggtcttgaactcctggcctcaagtgattctcctgccttggcctccgaaagtgctaggattacaggcaggagccactgcacccagcccacatttattttacaatctctttataaattatgctattgtctcaagttattgtgggtgctaattttcctgtttattaggtcgctgatggttaaatatggtagatcgtttccttgactactttatgtttttctgttgtgagcattccatttggcttgggttgtaacgatgtctctacagagaagttgtgcatggatattacttgcccaggaccaatttttgcactgctttcttagctgaagctatcaataccaggagggcagcacaaatccctacaaatctaatctacaaatagggttcccaaatccattcacagtgtaggcttacagttttgattttccatggttgacttgccctgatcctcacttctatgcatcccaggcagagacaagcttcctttctatttctctggactgttgtactgaacagtttctagaactctcttcaatgaatatatagtctgggaggagtatccagtctttttttttttttttcctccttaagacagcgcctcactcggttgcccaggctggagtgcagtggggcgaacatggctcattacaagcttaagtgatcctcctgcctcagccttccaagtagctgggaccataggaatgtcaccacacccggctgatctttttatgttttgtagagacatggtctcactttgttgcccaggctggtctcgaattcctgggctcaagctatcttcccacctcagcatctcaaagtgctgggattacaggtgtgagccaccacacccggccccccagtctttatacatgggcttcagttccaactctcagggccacatggacccaaggttccatctcccatcattacatgtgtagtaaaacccaagtctctagcagctgggtcctgtctgtatccaacaaccacctccaggacaagagagacatcaggccacatcttattgctctggttccctttttgtttttgactcctgaggatttcctcttacacgttcagcaatgaatttacttttttttttttgaaacggagtcttgctctgtcacccaggctggagcgcagtggcagaatctcagctcactgcaagctctgcctcccgggttcatgccattctcctgtctcagcctcctgagtagctgggactacaggcgcccgccaccacgcccggctaatatttttataattatagtagagacagggtttcaccgtgttagccagaatagtctcaagctcttgacctcgtgatccacccgcctcggcctcccaaaatgctgggattacaggcatgaaccaccgcgcccggccagcaatgaatttactttctttccctgtgtgcttgcttgcttcctttcttgtaatataataggcagggttttctggtgtttgtgttagaaaaggttcccagccaggcgcggtggctcatgcctgtaatcctagcactttgggacgccaacgcaggaggatcccttgagcttaggagtttgagaccagcctggacaacacagggagaccctgtctctattttatgtaactacatttaaaagataaaaataaaaaaagtttttaaaacgttccatactagctcagtctgacgttggaaccagaagtgtttttatacataaagggcacatcctgatgatttccctaaaaatctgcagacagtctcaatggtgaatgaaactctattgtaggaacagaatggtgtgggctgcttagaaacaacagttttcttttgtttgtttgttttacatacagggtcttgttctattgcccaggttggagtgcagtggtatgatcacagctcactgcagccttgacttcctgggctcaagcaatcctcccatctcagcctcccaagtagccaggactataggcatgtgccatcacacccaactaatttttaatttttttgtagagactggagggggtctgtcattgatacaggagtggggcagggaagtgctgggtagagaaaggcagggtccctggtgagggccccacccatggacccaggtgaagacaggcactcctgtttttgtgcccaaatgttgcattttccaagaccactctggcccgcacaccccccatcttgtgcctatataaaccccaataccctagtgggcacacatacaaatggctggatatggagaggaacacatcagaagaacacacggacgctgacaggccatcaactgcagaaggatgcggatgcctagggaaattcagctgagggtggttgaaggagagccaggcaactccaggggaagaccaccttcccactccattccccttctgtttccccatacatctgctgagagcaacctccaccattcaataaaaccttgcactcattctccaagcccatgtgtaatctgatttttccagtacactagggcaagaacccaggatacagaaaactctctgtcctttcaataaggcagagggtctaattgagctgattaaaacgagctgtctacggacggctaaactgaagagcacacagtaacacacgtctactgaggcttcgggagctgtaaatactcaaccctagatgctgctgtggggttggagcccacgctccccactacctgcccgtctgtatgctccccctagggtttgagttgcagggcactgaggaagcaagccactcccccgctgtcacacaccctgctagggggataagggaacttttcttgtttcattactatgttgaccaggctggtcttgaactcctggcgtcaagcaatcctcccacgttggcataagtgctgggattacaggtgtgagccactatgcctggcgtaaacaacagtcttctcagtgctttgactcatcaatatttcaaaatattttgggtccatgcttgagcagggggttaacatggagaagacaatgggggctgtgaacttgtgaagagggggctatcacttgaggggaggactggacttgcttacttgctcctgaaggcagactggtactggaaggggaaactctggcttcatgaggcagaaacttctccaaatcatattaacgtggtagcagctcttcaccccaggatttggtgatcttgatacctggtttgtttgtttgacccctgttcaagccaacaagccaggtatcaagaccacaaaaatacagtttttttcttgggtgaggagagagattttttgtttgtttagacaggatttctctctgttgcccaggctggagtgcagtggctcactcatggcccacttcagccttgagctcctggactcaagcgaccctctcacctcagcctccctagtagctagggaggactacagttatgcgccaccacacccagctaatttttttttttttttttttgtagagacaggattttgccatgttgcccaggctggtctcaaactcctgggctcaagcaatcctcccacctcagcctcccaaagtgccgggattacaggcgtgaggcacaaaaatactgtcgatagccagaaaaataatgtcttagcaactcacatccatgttagttgtttgtttctaggtcttgctagctcaaattccacttatccgtcttaatcaccatctaaaagatgcctttgtttttgagaatccatgtgtttgtgtaggttcaccactttcttttaatcttctgaatacctaaaataaacctttgaaatctagatcacgcacagtctaggttgagatgagagaatactgagcggatggttgtgtatgtatcaatgtgtagaaaaaggcatccatcgttatggcaaccagcatccttaactgatgcaatcctgttcccaataatatgagatgtgattaaaaattgacattgcagcaaggaagaacacatgcaatgcgttggcgtggcaaccggaatagttaaattctgcataaatttaaacctgtcgatcacagcaatttggagaatttgcctacatttcattaggaacccttttctcatctggcctgggagggaatcaggagcctggtggtctgacatgtggccatgacttaaggccaagtaaaatcaagggattaaattaaatcattggtgtgggagaggggctggatggtggactgtaccaaaagttaccctgttttcatctgcataccctacatcatttagtcactcaacagatatttattaagcacccactctgtgccccgctctgggctaggtactaggaatacaaaaactaatatttcctaccctcttggagcttgaaacctcttagcctctggaattactcaaatctatgtgaagtgccagctgtggtatgtgtaagcgagacaggtatcttgtgttaccagaaccaataacaaggagatttgattaattagagagatcaggtggaggcgaagagatcagtcaaagtgaagcagagaggggcagtgattgctacaccaccacaggaacccaaactgaaaacgaccatacgccatgaagtgggtgatagtctttaccaatgtcgaaatggaggacctgggggatactgatgttacccagcccttcgcagtggggtcacccaaaagtagacgcggctaatgccgctctttatgcccggcagggccaggaccagagtccccgcacgagggttcctctctccggtcgcacgtgcccttcacccttcctgaggccgttttctgacgctcctgagctcccctccagggtgagggcaggcgcggtgggaaggcgttggacagagcagacactcggctggggtgcatgcctgggtgcagcctcgtcttttgtcactaaccactcagctcggtagccctccaggctctctcttcgagctccgcggtccctgcgcccccgctgcgctctgctagctgtgatgcaggggttcgggggcaggaaaaatctcgacccgccacgcccgtgcggcaaacctgtcctaggttgagggggcatgaggcgcgcacaaccagggcctcgaaggcaggcaagagggcgcgggcgccacagaagcctgggcctgcgcctgggccgggcagatgtgcccggcgctcgggccccgcgctctgcgtcctgcagggaggcggacccgccccccgaacgcgcaggcgcgcggcgcccggctcggaccgtagctaggcgctgggcggccaccggctggccaggcaggtaagcaaccagcggtgcgtgggctcagaccttgcgtcccctgggcgccgcgccaccccgctccgtccagggcggcgagggctcaggtctgcggccccggcgtctcgctccttccgagcgcctccggcggggggcgcgggctggggaggaggttcgggaaaacgccggggaaagcggtctgggcggagcgcgcagggggccaggcgggtgcgggactccaggcccagccgaccctgcggcgtggcttcgggctgcgatcaggaggggcgaggagggtggaggctgcgtgtttggagatacgcaatcaattaagagtttttttattaatggaaaggtgtggagggcggggttttggttttcttgggaaatgaatgagtcatttggcaaactttcctaccattaattttggatttttataatggaatatggaattttttttgtttctctctctttttttttttttggccataaagagaaagaataaaaagaattccgccattttagcgttttaaaaagtaaccgttctgcggaactgtcggatcagtgaccgccccgcccgcctttgcctataccagtcccgggaggctggtggcgggtcccgatcctggaaccctgcgctcagggccgcttccgtcccctcccgagtccgggaagcagctgcggcgaggggcggggccgaggccccaagtttgtagcgctcagccttgctgtgtgttgttttctgggtagctgtcgagggctctactccccacccaacacctatagtaaggacatttattggtcgtttttgtatacaaggccttggaaggcaagggattgagaaaaccttgtcagacatcaagagaaaatacccatggacacattcagccaacagatatttattgagcatctgctatgtgcacggctctgggctggggctacaatggttgttttaggtcgggtcccccgaaacagactccgatagcaagatttgagtgtaggtttatcggagtgctcttgcgaatatcaccagtaggggaatgacgggttgggcggaagaagaagctgaactgctgatgtagtctcaacagaggcctcagcctgacctaatggaagctctggaactgagatggccctgcagaggtgttccaaagtaaggcaagggggtggggtctttacacctcatagcaactcgtcattggctggcggcttctaggagagccttcaagtgaggtagctccctaggctcagagcagttccaagagaggctgacggcagaaggctgaaaactttcttcagtgtccaccagaaacccagactcttctgagtcccccctcacttcatggcagactccttctcagtcccttttgctagacccttttcctcttcccaacctataaatgtgggtgtgctccaaagttcccacttttttctttatactcagttatgtggttttttcttttttctttctttctctctctctccttccttccttcctcccctcccctcccctttctctctgacagggtcttgctctgtcgcccaggctcgagtgtagtggtgtgatcatagctcactgcagcctttacctcccaggctcaagcaaccctcccacctcagcctccccagtagctgggaccacaggggtgcaccaccatgttcagctaatttttaaaatcttttgttgaggctgaggcctcactatgttggccatgctggtctcaaactcctgggctcaagtgatcctcccaccttggcctcccaaagtgctaggattacaggcatgagccaccaggcctcgccccagttctgtggttttaaatgccatctacacatgctggtcttcaaatttatacctccagccccaacctcatccattatctccagaatataagcttcatgagagcattttgtcatgtttgtgactgtaaccccagagcacagaatggtggtgacacctacttggtcctcccatgcttgctggaaaagaggcagcgaacccaaacagaaacgtagtcttcaaatccagcttcttcaatagacctgagatgtgacaggttttgacacagagtgaaattctttcagaagtaaccacattcactcttaactgccagtgtttcaaataaaaagattaactctatttatttatttatttattgagacagggtctcattttgtcactcaggctggagtgcagtggcgcgatcttggctcactgcaacctccacctcctgggttcaagggattctcctgcctcagcctcctgagtagctgggataacaggcgtgtgccaccatgcccagctaaatttttgtacttttggtagagatggagtttcaacatgttgtccaggctggttttgaactcctggcctcaagtgattggcctcccaaagtgttgggattacaggtgtgagccaccacgcatggcctgcctggctaacttttgtactttttgtagagatggggtttcaccatgttgcccaggctggtctccaactcctgagctcaaagcgatccacccaccttggcctcccaaagtgctgggattataggcgtgagccaccacgtccagcctaactctaaaggtatttaaaatagtacaagtacttcagctgtgcaaagcaaattggaattgaaattcagggaattatgttttataattttctttctttctttctttcttttttttttttttttgaggtggagtcttattctgttgcccaggctggagtgcagtggcatgatcttggcttaccgcaacctccacctcctgggttcaagcaattctcctgcctcagcctcccaaatagctgggattacaggcgcctgccaccacacctggctattttttttttatttttttgtgtttttagtagcaatggggtttcaccatgttggtcagactggtcttgaactcctgacctcaggtgatctacccacctcggcttcccaaagtgctgggattagaggcgtgagccactgcgcccagctaattttttttttttctttagagacagggtctcgctctgtcacctagaccggagtacagtggtgagatcatggctcactgcagccttgacctcccgggctcaagcaatcctcctgcctcagcctctggagtagttgggactacaggcatatactgcaacacctggcttatttttattttttaattttttatagagacagagtctccctgtgttgcctaggctggtcttgaactcttgggctcaagcagtcctcccacctcagcctccagagtactgggattacaggtgtgagccactgcattgggcccatacagtgtttttttgttttggttttggtttttggtttttgagatggagtcttgctctgtctcccaggctggagtacagtgggacgatctcggctcactgcaacctctaccctccacctcccgggttcaagcgattctcctgcctcagcctccccagtagctgggattacaggcacatggcaccaagccggccccatacactgttttttattaacaagttcaagttactgaaatccaacacaaggacttattaagcacctactatgtgccaggtactaagtgttggggatacagcaatgaataagacagacggtcagcatttatgtggagatgactgatcaaacacagaaataaataattgaagatcactattgattataatgaaggatgagaaagaaagaaatatataatagtaatgagacagatagtggtgggatggggtgaggggtgtgctgctgctttaaattccttggtcaggccggactcgatggctcacgcctataaacccagcactttgggaggccgaggtgggcggatcacctgaggtcaggagttccagtccagcctggcaacatggtgaaaccccgtctctactaaaaatacaaaaaatagccaggctatgtggtatgtgcctgtaatcccacctagtcaggaggctgaggtaggagaattgcttgaacctgggaggcagaggttgcagtcagccgagatggcaccactgcactctagcctgggcaacagagcgagactccatctcaaaaaaaaaaaaaaaaaaaattggtaaagaaagacctcttctgaggaggtgactattgagttaaggcctggaggatgggaaggagccagtcaagcagagagcttggggaagagcattccagagggagggaacagcaagggcaaaggctgtgagtgggaatgttggtcaagcaatagaaggaaaccagagtctgttgagtggagagaacaggggaagagtggtggaggatgaggccagagggaaaagcagaggtcagattttctagggcaaagtgctttgattttactgtaagggcaatagagagccactgaagaatttagatagggaaattatgtgatttggtttatgtttttaaagctttttcgactggagagtagactgtaggggtgcaggaaaggaagcagggagatgggttagaaggcaatttcagaagtccaaagagagctgatgttggctgggactagcatggcagcaatggagatggagagaagtggttagaccttcagtgtgttttggaggtagcactgacaggccaattttaatacgtctaaagctgtgctgtccaatacaatagtcatagctactgtcgctatttatttacttatttcttgtcagagacagggtctcgctatgttgcccaggctagcctcaaactcctgggctcaagccatcctcccgtgtcagtctccagagaacttgggactacaggcatgcaccactgtacctaccttctggtcactatttaaatttaattaaaattaaataaaataaaaaattcagttcctcagtcatagtagcccatttcaagtgctcaatagccacatgtggctagtggctacggtgttggacagtttaagtattggacattctcattatcacagaaaattctactggacagtgctggtaaggcaagtaggacagtggtcagtacattttaggtgctgagtaaatagatattaagtatattctttgtatctctaggtctttttctttatgtctttacctgttgaatgaactctgtgaaatgcttctactgcctttgcgttattaaaacaaaatcacgtactgacttgactgcgtcttcgtacactatgtctctgctcttcagatgcatacatttgttcagcagatgcttgagtgcccaccctgtgcttggggttggagggagtggtggacagggccataaaagaacatgatcaggaaagatcccacctcccaggaagatgaaccctgtatgggtgaaggaaaacctggtacttgaggtctctgaatccccagagggaggagggagtgattccagtggggatagaggtggggtcaagaaaaaggtgagtttggatgtggcctgggctatgtcctggagacaactggccacacagaaccttgacctgagtcatgctccccagagtcagttttgtacatcacagtttacaaagtaccctcacacatgccaccctacccatccttaccatccttacagagactggggaggtgcagggcctggccagaacaggagccagacctgatgctggtctctgaagacaccctactccccacaggactgaggcctttctctgcaggtcacgggtttgaaggtggctagcttctcaaagaagccccatcccttcacatctccattgctgctgtaacaaaggtccccacctgatcaccctgggggctatgtttggcttgtaggcctgccaggatggaggggcatgctgggatggaggggcatgctgaaatggagatgctgaggacactgaaggggccttccacaggggaggtcagcatgcacttggtggccggagacagccccggttctggtcctcacctgcccgcaactgccttcatcattccaggtgagtcaagctagggtaggagtctgggaaggaagagcatctctgtacctgctcaagcaagtgtggatcctggagaggggatgaccgttttcactgtcctccacctgccttccttcacatgcctacacatgcatggccggattgaggtagggccactagactcacctgtgtcgtgtctatttgtatatctgtttacagccagttcggccaccctcggcctgcccagcagtgccctggatgtgtcttgctttccccgggagccaatccatgtgggtgccccggagcaagtggccggctgcgaaccagtttctgccaccgtcctgccgcagcttagcgccgggccggccagctccagcaccagcacagtgcggcttctggaatggacagaggccgcggccccgcccccagggggcggcctgcgggtcagtgtctgtggggattggctaagcctcgtaaaccgcagccatggggcggggcttgcaggcccggaggctggacctgagacggaagtgggggaagctggctcagatgatgggccctaggggtgggctttgagtgagggactctcggggcgtggcttgagttgaagcactcctaggccctggggactatgggggcgtggcttggagtgaggcactctgggactgggcctgtgggtgtctgggggcgtggcttagactggggcaccctgagtgggcctgtgttagtttgggggcgtggcttagagtggggtaccgtgggactgggcctgtgggagcctgggggcgtggcttagagtggggcaccctgggactggaccccgcaggtgcttgggggcgtagcctggagtgagggtttggctggtgtagcttggagtgaggccccctggcgtggagtcttgaggcctgctgagggcgtgagctggcatgaggcgaagagagggccatggcaccgactccgagatgggtcaaggacccgtacgggagtcgcaatcctcagaccctcccgcgctccagttccggataagcgagtataagccgctgaacatggcgggagtggagcagcccccgagccccgagctgcggcaggaaggcgtgaccgaatacgaagatggcggggccccggcgggagatggcgaggcgggcccccaacaggcgggtaggagccccgctccccaggccctgagctgggccctgtgcgggtggggcgaggcctgagccccagaaggttcgggggcggggcccggggtggtcctggggtggagaaggctggaggaggccatccgatgcggagatggaccgaggcggaggcagggcctgagggggcgtgggcggagcctgagtgtggctgcgatggggagggaggcctgaggcccatttggcccccgcagaggaccacccccagaatcctccagaagatcccaatcaggaccccccagaggatgatagcacctgtcagtgccaggcgtgcgggcctcaccaagccgcgggtccagatcttggttcctctaatgatggctgccctcagctgttccaggagcggtaaggggaggaggtcgcagccctacttgctctaccttcagcccccaaagcctcattcctgttcaggggttaggagaggggctgggtggtgcagggcgggtggttctttccctaaggctggcccttcctcaggtcagtcatagtggagaactcctcaggctctaccagcgcttctgagctcctcaaacccatgaagaagaggaagcgcagggaataccagagcccatcagaggaggagtcggagccagaggccatggtaggaagagggcagtggggaagggagggggaagctatagcctatgcctcaattcccactgtcccctccatcaatccagattatggagctgggccagagaagacacgcataatgactcactcatcatattttggggtcccatcctgagttaggtcctatacctggttaaagggaaatgaattaatcactctcttgattttccagagctcccatctcagtttagtgtcaaggttaagacatagtcaggtgaactagcacccaaagtacatgtgcaggcagctggaaaactccatcactggagtccagtgcctaggccaaaggccagggaacacccagggctctagctgcagaagctggaagggacagagcatgaattctactgggcgtgtaagagcatcacaaaggaagtttttgtgtactcagtttctctaccagataataaggagagttgtagtcaggctgtttaattaggatgtgcatgctcatgtgagtctgtgctcaagtgatagggggatgtctgctggagctgcactcctgctggcggcctagaagaaattctgcctgtttggggcagaacaccacatggccagagagccaggtaggggccaggatcagaccctagggcttcatcccaaaccatgaggagaagaagctgggatcaggcttgccttctacaggagaagcaagaagaaggaaaggacccagagggacaacccactgctagcaccccagagagtgaggagtggagcagcagccagcctggtacggtggcttgtgtgtatatatattcgtgtgaggtgtgtatatacctttggaggtgtgaggctgagaatgtgggttatgattgtgatggtaggttgtacatgcataaatgagcatgagttagtgtgtgtgaaagagagagagacagtgagagactattttgggtttgtgtattagtgtatgtattttcttgggagttatatgatgtgtttgtttatcctctattatccagtcatgactaggccccagtgccagggagatcttggctcaatttttgaagacttgagtaacttttactggcaccacatgtcattgcttctctttagtggtggggcaagcctgcactggtcattggtctaacattcctgtttggaaccctattctcactctttgattctaagaaaaatggagcagaggtcattcatatctccaaccttcaggccttctcaattaccatctccacattcccacatgacaactgtcaactgtagctaagtagcatacttgtaatcacatagatactgtgtagcagtttgtttaatgtctctcttctgccctcaaaaccatcaacacaaggacagtatctgtttttttttttcttttttaaaattttttaaattaaaagttttggagggtgaccgggtcttgctctgttgcccaggctggagtaaagtggtgcaaacacagctcactgaagccttgacctcctaggctcaagcagtcttccacttcaacctcctgagtagctgggaccacaggtgcatgccaccatgcatggctaattttttaaatttttgttatagagatggggatcttactttgttgctcaggctggtctcgaactcctgggctcaagcagtcctcctgcctaggcttcccaaagttctgggattacaggtgtgaggtaccacgcctggtcgtctttttttttttttctttgagacggagtttcactctgttgcccaggctagagtgcagtagcgccatcttggctcattgcaacctccacctcttgggttccagcaattcttctgcctcagtctcctgagtagctgggactacaggcacatgccaccacatgtggctaatttttgtgttaatagagacagggtttcaccatgttggccaggctggtctcgaactcttacctcaggttatctgcccacctcagcctcccaagtggtgggattacaggagtgagccaaggcacccagccttttttttaattttaatttttaatttaagaaatggagtttcactctattgcccaagctggcgtgtagagctgttcacagacacactacagcctgggactcctgggctcaagggatcctcctgccccagcctcctgagtagcagtgattataggcatgtgccattgcacttggttcttgtatctgttttattaatcattttatccctggtgcttagctagagcctggtatggaataagttctcaatcagtgtttgttcagtggatgaatggattgaatggatgatttttatgttgatggtttctcttggactatggcttagttgcctcagtcactgtctttcccgtcccacagagaaccagacagatgaggtcatttcttaggacattatcctgccttgatggatccagtgccagctggaggagcccaatctgcacccagggctctgaactttttatagtgcttcttccaacttctgcccattgtagctaaaccagaacttcactattatgtctcacccatggtattcatatcagaaggcaaaggtttagctctctttggtttatggcctcttaagacttatgcagaggaaagaagcagtgtcttaactcctgtgggctcaactactgtatcttacttagataaatagattcataaatcaacattcttttagctgggtcctgttgaccagtacaaatcttttgaagcatactactcactgtctcaactgtgaatattagtgtgacattttcccccaacgcctttttttttttttcgttttccaaggaaagaaactgtatcagtagacagaagtttgcatctatgactgaaatgttttctcattttcagagtcttctgacagaagaatctggggggtgggaatgggggttgggattgcttgagtttcttgtatgtgggaagaatctatgtttgagctatactctgtttggcagtttgatggccagctgttcaattcacgtcccacagacctgacatacctagtgctgacggagtgctccagtagtttaagagttaaaaacatgtgactcatgtgcccattcaggccttctgtctcatagatcttctccttttcgataaccatattttgtgaatgatgattttctaacacaccattgcaagtttctacaacttacttagtcgttaatagatattctgactgtgttcacagttatagtagtccccttttatctgcagggaatacattccaagaaccccagtggacgcttgaaaccatggatagtactgaaccctatggatactgttttttttcctatccatacctacgataaaggtatgataaataatacactttaaggccgggcacggtggctcatgcctgtaatcctagcactttgggaggccgaggcaggcggatcatgaggtaggagtttgagaccaccctggccaacatggtgaaaccccatctctactaaaaatacaaaaaaaaaaaaaaaaaaaaaaaaaaaagccaggcatggtggctcgcacctgtaatctcagctactcgggaggctgaggcaggaggatagcttgaacctgggaggaggaggttgcagtgagccgagattgcgccactgcactccaacctaggcaacagaccaagactctgtctcagggggaaaaaaaagaaaaaaaagaatacactttaaggctaggcatggtccctgtaatcccagcactttgggaggctgaggtggatggatcacttgagctcaggaattcgagaccagcccaggcaacatggtgaaaccctgtctctgcaaaaaatacaaatattagctgggcatggtgttgagcatctgtggtcccagctactcgggaggctgaggctggagaatcgcttgaacccaggaggcagaggttgcagtgagctgagagtgcaccactgcactccaccctgtgtgacagaaggaaaccctgactcaaaaaaaaaaaaaaaaaaggctgggtgcagtggctcactcctgtaatcccagcactttgggaggccgaagcgggcagatcacctgaggtcgggagttcgagagcagcctgaccaacatggagaaaccccatctctactaaaaatacaaaattagccaggcatggcgtcgcatgcctataatcccagctacttgggagcctgaggcaggagaatcgcttgaacctgggaggcggaggatgcagtgagttgagatcgtgccattgcactccagcctaggcaacaagagcaaaactccatctcaaaaaagaaaaagagatgaggtcttgctgtattgcccaggctggagtacagtagtgattcacaatgcagtcatagcacgttgtagcctcaaactcctgggctcaagggatccttctacttaagccttctgagtaactgggactacaggcaccctgctcttggttttttgttttttctaaatggtgtcttttaaggagcagaaagttcgttttgatggtgcccaatttgtcaattttttaatgattagtgctttttccatacatttttataaggtaccggttcttaatagctttactgagatacaattcacacaccatacaattcatccatttgaagtgtacaattcagtggggtttttttttggtgtattcacagagttctgtaaccatcaccaaaacatttccatcactcccaaaagaagtcctatatatctattagccatcattccccctaaagaccaccagcagtctgctttctgtataccagatttgcctattttggacatttcatataaatggaattatatattgtggttttgtatgcctggctcttcacttagcacaatgttttcaaggtttacatattttaggctgtatgtgcttctttttattgctgaataatattccattgtatgggcataccacactttgtttattcatcagttgatggacatatggattgcttctacttttgcgctattatgaataatgccagtatgaacatttgtatacaagtttttgtgtggacatatggactcatttttcttgggtatatacttaggggtggaattgttcagccatatggtaactccatgtttagccttttgaggaactgtcacactgtttttcaaagtgtctgtaccattttacattcccaccagcagtatatgaggattccagtttatccccatcttcaccaatgcttgttattatcttttttattatggtcattctagaggttatcaagtggtatctcattgtggttttgatttgcatttccctgatggctaatgatgttagcatgttttcatgtgcttatttgccatttatatattttctttggagaaatgtctattcagatccttgcccatttttaaattgggtttaaaaaacagattttatattgaaatacaaggactgccatatggagttggtgaacaagttgagaatatgagtgtgtaattcagtaccagacatggatcagcatgctacttaaagcagcacttacttaactgtggtccttaatctaagtttacatgcaaaattctgtgacttgtttatgtgaattgtccatggctttcattacattttcaaaaagggtccatttatacttcctagaaaccaaaggcaattttaatggctgacaccaggtaaacaatagactataacattttggagcccagcctcttcagtttggtgttcccaggcgtagatccctataaggcacatgttaaacataagtatcaggctcttggttaaactttcagtgtcttaaaatgaactaattatgaattggctaatcatgctctataggagaggcaaacacacaaatatctctgtagcaaattgaaagcaaaaagacccagcacatagtggtaccctgatgactgcttgtaattaattgattcttgaatcttggcattctgttcttccctttacattttctgtagacattgtagtgaaaggtctgactagagccattaattttttaattatctatactgagataactgaaagtatgctgaagaagcttcccgaaggaataagaaaggaaagaagatgggagggaagtactgtgttggtttctaggtttgcaccattgaggagcagggttgaggcaggaggagaaagaagaatagagctaagagagtgtggtaagaaagaaatgccaagatggaatgggtggttgggagcacgtgaagatcaagagttgaagaataagaataggtcattggattttgaccttagtaactgaagagagcaatttcactagtgtgtagaggtaggcatgagactaggtgattaagaaaggaattcatcaaaagggcgtaaagttcataatacccccttttaattattttattttttatcattatttttagagacagggtcttactgtgttgcccagactggccttaaactcctgagtgcaagcgatcctcctgcctcagccttctgagtagctgggactgcaggcatacgccactgcacctggctccccttttttatttatagtaaactttattttcactgatactccatttaacgtaatttcaaagtagctctgtgccctaagatgagcaaaagaacagatatcctaaatatcataagagattttcttcacactgttcctctgagcacagcatgaggtttcagagcccccagtgttgccacttaacattttattccttgagattttacctataagatacagaaagaggccaggtgcagtggctcacgcctataatccctgcactttgggaggccgaggcgggtggatcacgaggtcaggagattgagaccatcctggccaacatggtgaaaccccatctctactaagaatacaaaaattagccaggcgtggtggcgtgcccctgtagtcccagctactcaggaggctaaggcaggagaatcacttaaacccgtgaaccggaggttgcagtgagctgagatcgcttcactgcactccagtctgggcgacagagcaaaactccgtctcaaaaaaatgatacagaaagaagatataatatcaatacacaagaatcaaactgtattagggtatctgtgggattgtaatggtaactgaatttttccctgctaagtttttttttttttttttttttttttttttttggagacaggatctggctctatcacccaggctggagtgcagtggtgcgatgtccgctcactgtgacccccgccttgcaagactcaagccatcctccctccttagccttctgagtagctgagactacaggcgcacaccaccgtgcctggctaatttttgtatttttgtagagacagggttccgccatgttgcccaggctagtctcaaactcatgatctcaagctgtccgtccgccttggcctcccaaagtgctaggattacaggcatgagccactgtgcccggccaacggtgtcttttttttttttttttttttcctaaagtaaaatgtcagatggccgggcatggtagctcacctctataatcccagcactttagtaggccaaggcaggtggatcacttgagctcaggagtttgagaccagcctggttaacatggcgaaccccgtcgctaataagaatacaaaaaaaaaaattagctgggcatggtggtgcacgcctgtaatcccagctactcaggaggttgaggcaggagaatcacttgaacctgggaaacggaggttgcagtgagccgagatccgccactgcactccagcctgggtgacagagtgagaccctgtctcaaaaaaaaataataaaaataaataaagtaaaatgtcagaatatgcaaaaatgctgtacttatttctgttaataccttgaaaatagtggaagtttgaagatttttaattcttaaagagtccaagctggaagatgactgctactgatggggtttgttcaacgtactgattccaagcttggcgaccatcagcaaactggtacctgcaattaaacctggagacataaattttccagagtggtagaatctcattcccataatgccagccaaggtctcagacgtagcaaggaaaacccaagcatcccttggatcctgagagctgataagcacccaggcctgttaaacccccagagaggaatagcattctacctgcttttgcatagtcagtgatccctccagaggcaaccagtgctgcgtagccaaaacccaaaccagtgcaaaggcactagtggaccagtatcctgcggcattgttctcttctcaccctgtcctgtgcagacagtagactatagcaggcctgcatttgcaccgctctcctgaaggtctgtactggtcaacaagatctccttatccttttaatatctataggacatttttaaatttctcttattttctttttatttttaactttttttaaagatagaaataggggaggccaaggcgggcgaattgcctgaggtcaggagtttgagaccagcctggccaacgtggtgaaaccccatctctactaaaaatacaaaaaattagctgggtgtggtggcgcatacctgtaatcccagctactcgggaggctgaggcaggataatcacttgaaccggggaggcggaggttgcagtgagctgagatcgtgccactgcactccaacctgggtgacagtgagactccatctcaaaaaaaaaaaaaaaaaagaaacaggatgtcactatgttggccaggctggtctggaactcctggccttaagcaatcctcctacctcagcctcccagagtttttctttgtttattaatcagtctttccagaaacttactaattttatttgtcttttaaaaaaaatttatttccattttctttgggttaattttacttttctaacttcatgagacagatttattttgatttttaaatttcattaattttagccatcctccttttctaatatgtttatttaaggctgtcattttcctctaaatactgctttggctgcatctcagtttttgatacatagttatttccatcgttgttcttttatttaacaaatactaagtgcctcctatgtaccagatagtgggctagatactaagagttcagagtaagcaaaacacagtactagcacttaatgagctcataatctagttgcagaaatagatatgtcaacagattattatgtaaccatataataagtgttatgtttgaggtatgtaaatacaaggggctgtcacagaacaaactctgcctgctggagtatagaaaggttccatggggtagatgggatgatattcatccatccatccactcatccatccatccatccttatagtcatttaacaagcatttgttgtgcatctattttatgtaagtcttgtgctaggtgctggaactatggctacgtcttgaaggatgtgaaaaaaataggctaatagaacaaggtgggggtgggattttaaagcagaagtatcaacctatgcaaaggcacagaggctcaggggcatggaaatgcatgatgaagctggcatgatggggagtagctagttcaccaaggctgtgtgtggtgtggaaaggtgtttagattttggggttttgggttggaaatgagaagccatggaacttaaagaaaataaacacgttttttcatttgatatgtattctggcagtagaataagtgtgaggcagagaccagttaagaggcttttggactaggctcaaagcaaggacagtaaatgtggagagatggatatagatccaagagataactaggagttggaatcagtagaatggaaggatcctggggagttaaaaaaaaaaaaaaaggcataaagtatcacttccaagtttctggcttgcgtgactggatgaatggatggtggcgccattgactagggtaacgaataccgaaagggccacaggctttggcagagaagttacaagtttggttttagatcaggctgagcttgccaaagaaagtgctatccaagagcatctggtctaaggaagcaggaataaacaaaggagcatttctggaagtggagagaggatcagtgccaccgctagccaatatggtacctttgtacaagttattaaaaaaaaaagcatctctccagggcagaccaattagaaaagggcaacctttcttcacagtagactcagccacttggcttggcagaaagcccaggatggattttagccccattcacacccttggctgggtacctatgtatagtgcacagattatacaaccatacacaggagccttgggacttacttgggtttagggatatgcctaagagctcagcccattgttcaacaatagaaaaaggaggcaggaaactgaatttggctgggggtgttggtcagggaaggaatctagtaattgctgaaggatttggtggtcaggcctctttccagtggattacattgaatcttgtcctcacccgtgaaaggggttactatgagccctccctatcatctaagggcattatgaggactcaaggagaccatgtatatgaagtctttccggcatctctgtacccccaatttctagtaccagacatggcacacaggtttaaccattaaatggtaaaaggaatggtgaaggtcaaatgaagaggtgcatagtggtaaactgaagaatgtatacttggtaagtgttgtgactagtgagcaaatatgaagatagtacaggcccagggagggacatcttcaggggaccagtggtaagagataatggcagataaagagggtgttggtcagaggtgtctgctgtggcatgggggtctcagagcttggtctctggagtatgggtaaagggaagcaagctgagaattgaagcaccaaagagcagcagaggcgcctgagacaagaaatctggcaggtagtcagccccttagctgatgttacggtttgggaagagtgaggcaaaaagaagaaagtcatccagggaggaagaaatggctgttgggaagggttctgtcatagtagaagagatttgggaaaagtgaagaggtcttatgcatgatgatgtggaatcccagtggcaagaagcagcaggatgatggcatcctgaagtctactctctcttctctttgccctactcagtaagaatggaggaagactgagtgggagaactggagggtttcttgagggaacatagtaggtgatatgttatactcaggacaaaggatagccggaagagatgagctctagattggtttccgcgtaggtccttgagagtttgatagcttgcttgatccattgatgaacaaaatatctgttgtggcccaactggatcaggcagttgagatctcaaggtttggtacagtgtctgaggaatttaggcagctgcaagacaggtgcttctaggccgagtgcggtggttcatgcctgtaatcccagcactttgggaggccaaggcaggcggatcacctgaggtcaggagttactggccaacatggtgaaaccccgtctctactaaagatttaaaaaatagccatgtgtagtggtgggcacctgtaatctctactcggaggctgaggtaggagaatcgcttgaacctgggaggcagaagctgcattgaactgagattgcaccactgcactgcagcctgggcgacagagtgagactctgtctcaaaacagacaaacaaaaacaaaaaacaggtgcctctagccacttaggtcccaactaaagcaaaaagggaaaaagcatcttcctgagagacagaccactccaagcctgaattatccagggtagtagccaagagaagcagagctagaatccagtcctacagccttagtgaagacccaggaagcactggtaacagaagtccagcactctgtatttcataaggatcttttatacatagatctgacttaatcatcatagtgatcctgtatggtgggtatctgcatttcacagatgacaaaatagaggtgtagaagtttctagaagaagctggagctatttacctaagggatatgaattgattcttgtgagttgttacgtctttagttgtctgtagccttcgactggaggcagctcatgctaatctggtcagcctacatgtaactggatattctagcctttaaagggtgtttgtcctctgttagaggctaggactccacctcaggttagattgaaggtgctgcaggagtattcatctccctccccaggaccctgagacttggaggcatggacaggacctgggctgtaggtcctgaccatagtgtatgtgtgttagtgtatgtgtgtgtgcacataggctgtgtgtgtgcacataggctgtgtgtgtctgggagggctgtggaatcagtatatccactctgggggtacccatcaagcacacatatacacatttgtgtaagtctctgtaagtgttcaggggaagaaggatcaaaaaagtgtttctttttttttttttttgagacaggggctccctctgtcacccagactggagtgcagtggcatgttctcggctcactgcagcctccgcctcctggattcaagcaattcttctgcctcagcctcccaagtagctgggactacaggcgtgtgccaccacgcctggataatttttggttttttgtttgttttttgagacagagtcttgccctgttgcccaggctggaatgcagtggtgcgatcttggctcactgcaacttctgcctcccaggttcaagcaattctcctgcctcagcctcccgagtagctgggattacaggcatgtaccaccacgcccaactaatttttgtatttttagtggagacggggtttcaccatgttggccaggctggtctcgaactcctgacctcaagtgattcacctgcctcggcctcccaaagtgctgggattacaggcgtgagctaccatgcccagccgtgtttcttgtttctcccaacccttccacttcttcctattttcatgttttctctctcatttctctttttcctctcctttccttgtgagtttagatggcattgtgattaagttctctggcacaggacttgtcactcagctttgtcatgtcagaggacagggtccctctgtggctgagactttgtaacttcagtcagttgctgaataatccagagtacttctgctgacagtggcctgagcgggtgggggggaagtgacgggcagaatttggtgtagccacacctgagactgagcctcccctcagccccgtgtctggcaccatcatggtgggtgggaccagagggtacatgtgaacacagacaaagatttgttttgggggtgaaggtagagcttggtcaggggaagccgaagaaagtcatatatcaggaacagcccaggagttagcctgtctgtcccctttccacagcaacaggtgagaagaaggaatgctggtcgtgggagtcctacctagaggagcagaaggccattactgctccagtcagcctcttccaggacgtgagttggacaatttccccgtaggaacagcttgtcttcctagcctagggacacaccaccaacctcaggccttctggcgttttctgtgtcaggcatgcctcagtggactggcagaatggaaagggagagactgtttaggggcccagagtggaaaagggccccccataaggggctggcagggtgggaagaaacagagaggtggaagctaggctcactcatcactgggcctgcagacttttgaattctggtgacttctactcaattcagcattgatctttccatgactttggtgagagggagcccttgagtccagccctgactcacccacatttttcaagggacctgggagatattctctctctctctctctagatccctgtagtaacgatccccaaataagttgcccctttggaaataccaggcgggtggggcctaaaggcagctccttcaccccaagcccactaggcaaggataaggctggatggaagctgggtcctctccactctgtgcgttgacagtcccaggcagtcactcacaacaagaatggcttcaaactgggcatgaagttggaaggcattgaccctcaacacccgtccatgtacttcatcctcaccgtggctgaggtgagctggggcttggtaccacctttctgatgatgtctctcagtgcagattgatggatcttgctggggacatagaaggaaacacctccctcccctcagagcacacacaatctagtagtggatgaagctggaatacatagaaagcttaaaacaacaaaaaccagatggagttcatgggacagtcctattattggatgaatgtatactgtccactctgggggagcttgaggagatcccgagggccagggatgttggcatgagtcaaacaaggtccttgtcctctaggagctcacagttgtctggggaatcagccaaataaacatgtcagtgacatgccacaggggtggcagcagacttgagctgggaggcacagttgggtcagttctgtctgaggagcagcaaaagcatagaggaagggcctcctttgcagagtcttgagagataagttgtgaataaggagggagctccaggcagaaggagcaaagtgggcaaaagccctggggcatggaacagactgctaccttcaaggaattgccactagctcagcaagactggaagcagagtgcgagtggggagcagtgagagaaggtagcagagggagcggtcatcaggagccctcagcagtcctgagccttggtggctgccctcagaattctgtccagggctcaaaagggcaggaagctgtcatagggtccacctcccttgcatccagaactcagggctcatgagtacatgaactgtcctcactgtagaataggacagggtggggtacaattgggaggaaagaaaggtggggttggggaacctgctagcattagagcccctgagaccaccagactgggccaggagaggtgaggcagatggggagtggggcatctcctgacattggagttcctgattcccctcatggggccaggtatgtggctatcgcctacgcctgcactttgatgggtattctgagtgccatgacttctgggtcaatgccaactcccctgacattcaccctgctggctggttcgagaagacgggccacaagctgcagcctcccaaaggtaaggcctagctgggttggtcacagtgaggcagtgagtcctcagacccttcgcttcttccccttgggtccccggcttccagctcttttgttttctgaccctgtaccctgttccaaagccagcctctcttcatcgcatcctgatgactctgcgctggggccaagttgaccagaagccctagaacttccgctttgcacttgccctttgagtgtctactcaagtcgtgtcctgcttcagtagtggggaatccctgggcaagttcttgagggttggggggaggtcctcaggcatgcctgattctgctgcttcactgtggggtgcccttgctgtggcccagcctctgcacggcgctctgttcatgcccctcgaggggcctaggttacaaggaggaggagttcagctggagccagtacctgcgcagcacaagagctcaggctgcccccaagcacctgtttgtgagccagagccacgtgagtgcccctgagtgagagtggatgtcactcccatgtgccagagttcactgcagctggcccagggtatctgactcatcagaagggagctcatgtgctggttctctcagctttgttctgatctctcatatcagatgggaggggtacagctgggcagggtccagggccagagatgggaagctggttataggtttttcccgacttccctccctcctttgctactgcagataccctgtcctcacatccccttggagcccctggcccactaccctagtctgagcactgagatgtcattgctcatatattcttgctttggcttgctctgcagttctttggtgtaaggtcaatgcctctattctgggagcttctttttctttccttttgcccaacattgagactcttccatttatttccaacaattcatcccttgtcctttcctctgttcagggcagctggcagcttatccagcagttaaagtatctcataatcccaaccaaaaggcctaagagatacagggagcctccattaaaaatatcatactggaccaggtgtggcggctcatgcctgtaatcccagcactttgggaggctgaggcgggtggatcacctgaggtcaggagttcaagactagcctgggcaacatggtgaaacccccatctctactaaaaatataaaaaattagctgggcgtggtggtgggtgtctgtaatcccagttactcaggatgctgaggcaggagaatcgcttgaacctggggggcggaagttgcagtgagccaagatcacgccattgcactccggtctcagcaacaagaacgaaactccgtctcaaaaaaaagaagtatgtatcagtcttactggctgggtgcggtggctcacacctgtaattccagtactttgggaggctgaggcgggaggatcacttgagcccaggagtttgagaccagcgtaggcaacatagtgagaccccatctgtacaaaaaatgtcattaaattattagctgggcatggtgcatgtgcctgtagtcctagataccacagtagctagctgagctgggaggattgtttgagcccaggaattcaaggctacagcaagctatgattgtaccactgtaccccagcctgggcgacagagtgagaccctgtgtctaaagaaaaaaaaccatattgaatgtctagagtttccctgggcccaggactccaccatgctcttcaggcagagacagttactcccctaccccagtccagccccagagttcatacttgcaagttcccaggtgacaggtggggtcctgcctgctgttgtgacaacgaatgccgacttttaattcaaactatttaaatactggccccgccgttgactagcattgtgttctgggccaagtgatttaacttcttaaatgggaatagggttgttgtaaaggtccaaggaggtgatgtcttttgaagcttacatggcaggtactcagtttatactggttccctgtctgcctctatgccatagatgtccgctgtttcttcccagccaccccactgttgccacaactgcctcaggacaagctgggaagggcttgtctgggtagggaagatttatacttggttcaccaggttctttgggcgaacgcatagcctccttccaggcacttaccttctgacacaagccaggcctctgagtgcaccttggaggccagaggttcctgagtgcctcagggctcaggttatgattctgccctggagggccctctttcccagcttatttctccttcctttctcactgcccacaccccaggctttcctagagaacctattcctttgtttgccaatgggctctgggctggtcttagccagcttggccctggccgtggcagctcctttttttcccctagagtcccccacccctgggcttccaggtgggcatgaagctggaggctgttgaccgcatgaacccgtcccttgtctgcgtggccagtgtgaccgatgtggtggacagccgcttcctggtgcactttgacaactgggatgatacttatgactactggtagtaggagggcccagacttggcctcagggggtgaggggatggcagggggcaactgctttcatatctcaggtaccatgtggcaccactcagtccagttctgacattcagatcttcctccggttggaagataattgaattgagctttatcataagaaatacagctcaatattaaatgtttcatctaaaaataccatggttaagatgagcaagcccctatgattcatgattttcccttagatattatggtgatggtagagtttgtaattcatgttgcaattttctaactttgtccttgccatctgtctccctctcactaagaagtagatgagggtgggccctgagccatgctttcagaggatggcaggctcagggcctcaagtttctcttgggacagtgacatgttcttggatttcaggtgtgatcccagcagcccctacatccacccagtgggctggtgccagaagcaaggaaagcccctcacccctccacaaggtgaccctgcagcctgagcaagccccctttcctaagcctggctctgcttccctctccactgacccctcaccagtagtgccccagtagctggctctctagggtcagggtgagagaacagacatgtcctgaagcctcagcttcttggcctgggagttgagaaccctttgattttaggagactcctgtcaaaccctgactccactggggtttaggggaagaaagttacatgaccatctcagcaaggaaacagggaatcagaagtaaagaaaatgagtccttcatcctgggagtattgcattggcccaaatacagtagagattcaaatggggctggggtgggagcaacaggccaagagtgacaggagtcagggttcccagacagccctgtgaactattagggtggtgccttgcttggttctactagcacccatctgcctgaggagcccagtgcaaggagctggctgtggtgatggtgggagagattctactccaagggcttctgtcccttccatgttcctggtcctgcttgggggcagagggcttccgcagtacacctgggtggctagacattgctctcatcctctcctccagactacccagaccctgataacttctgttgggagaaatatctggaagaaactggggcctctgctgtccccacctgggccttcaaggtggtgagtcagtgctccctgaccccagagctgagctcagaaagacatggagcactcagctagccaggctggggccctagccttcccctttgggcaggccccagtttccccaggcacagcatttgggctccctctgtggggctcagctctgctgagctgcgccttgccctgaaggcagctgtcccctctgcagcgaccccctcacagcttcctggtcaatatgaagctggaggctgtggaccgcaggaacccagccctgattcgcgtggccagcgtggaggatgtggaggaccatcggataaaggtggctctgggaccctagggctgggaagtggacaggccagttgggcaggaattctgtagactgtttagaggtcaggggcatcatggcatgagagagatgaagccaaagatcttgaatctcattcttgcctcatctgtgacttatttttgtgggcttggacaagtcattttccctctctaagccttacatcatctgtaaaatgggcctaataatcctcgtcccacctaaggattgccagtgggagatgccagtaacttaatgagtgatgcccttggaaaatgtggtggccaagacagattattgcagggttggccccttggttctttcaatccaggatcttgcttctgacaggtcccagggatggggagaggaccttctggctgagctgggctccatgagaaacgcctgacttccaagagcctttcctccccagatccactttgatggctggagtcatggctatgatttctggatcgacgctgaccacccagacatccaccctgccggctggtgctccaagacaggacatcccctgcagcctcctctcggtgtgtacccctagggcactctgatcttttcctttccccccaggttctgacaatcctatagtttgcctacagagctctgactccccatgcccaaatatgacacagagggctctgatgcctaccatgagttccagaatcccccatctgccccacccccggaccatctgctacactaagcagtgcttctggctaccccagttgtcggggtttggggtgttgaggtgcaaaggggcaagctcacttggttgcatgtgcttcagaggtggtcaggcacccagggatttctctcagcatctagcagagccacactgagcgtgcactgtttgctaaggacatgatggcttcctaaagtaaattctgattgtctgtgcaggcaggggttagagttcaggtcactgggctgctcagccccattttcacccttaggatttcccttccttatttccctgctgcaaccgtgtttgtctcacatggggtgttgatccttcttgaatgttctccaagcataggcagagccttaaaaaagttaccaaagtcttggggatgaaaacaagaaaaagaactgagagtgacatgaatctgccagatgtggcttctaaggtatggctacacccaaccagctctgagtggctcttctcccccagagttctctcagagactgagggcatagcctgcaggtttcagcaaagtattaacatatgagagctaagccctccttacccagagaggggcagatatccagtaacacagaatggtgtcacagccaacgcagggccctcatccttggggagtgggtttctagtgctgatctccccagtggaaactgctccttccgtgccccacactccccacccccaggactccatgaggaccgcctcctttctgctcttttaggacccagagagcccagctctgcctcccctgggggctgtccccctctcagctataggagcctgccccacactaggacctccaaatacagctttcaccaccggtgagtgaaggttcctggtgagagaccctcagcgttgttttgcacttactgcatgcaggcgactggggtccaccaaaacacactccagctgggaccagggctgaggagggctcagcggggaccagtggattaaacccaactgaagtctcttcttccccaggaagtgccccactcctggttgcgacggctctggccatgtcacaggcaagttcacagctcaccattgcctctcaggctgcccactggctgagaggaaccagagccggctgaaagcggagctgtctgactcggaggcctcagcccgcaagaagaacctctcaggcttctccccaaggaagaagcctcgccatcacggccggtatggaggccagggaatcagggcccgggcttcctgggggtgtggggccttgtagcctcttggactgggccagacactgattccctgccatggacctggtccgtctttctccagaattggacgccctccgaagtatcgaaagattccgcaggaagatttccagagtaagtctgggttatctgctcctatgtcctccaccacagagtgttcacagcgagtgctctgtcattggtgggatgagacagatttcccagagtgggagaagctagaaggagggctgtgcctcttcgtttgagatactgagagcacagagcagtggcaaaagcagtggaggggccttgagtgaccttgggttccaatctcatgtcccccatggccttgctgtgagtctgtggggagggtacagagcttctcggggcctttggttctcactgtgcagcaagatgatgctcctgctcttctctgattctaggcttcctgggaaggaggccatggccatcactttctacctgtgtgatcttaagcaagtcacttaacatctttgagcttcagttttctcacttgagtaactggataaaacctgcctttccattgtcaatacctgaaataacagtggttactaccactgcttactgagcatctactatgggccaggcactatgccaggttctttacacatactgtgtctaactctcacaagagttctctaacatgtatattgttcttctgtgagaggaggaatgtgagtctcagagggtgatgtcacttgcccaaggtcattcaccttgtaagggggagagctggcattccaactcggatctggcctgactcctcctgctgcatgctgctggtataagagacataaagcacctaacccaaatgtcagttcacttctcactccccttgcactagcgtgcttgctgctgtaacaaaaataccatagactgggtggcttacacaatagaaatttattttccacagttctggaggccagaagtccaagatcaaggtgttggcaggcttgatttcttctgaagcttccctccttggcttgcagatggctgccttcttgctgtgttctcacatggtctttcttctgtgcacaagcattcctggggtcccatgatgtgtccaaagtgtctcttcttgtaaggataccaattgaattggattagggcccatcctaatgacttcattttaacttaatcactctttaaaggccctttttccaaatgcagtcccattcagaggcactgggggttagggcttcagcatatgaattttgcggggacacattttagcccataacatacttcagcgggaggggcatagtggctgagccctcccctaggtggtgaattcatcttacatcttcagccactagtacagggcctgatgcacagcagggacgcctcagttgaatggaatgcatgtcattttaaggctaaaagagaccttgagaaatcacctggtttagtgcaccttggcgagacccaagctgtcccaattcttcaagaacagtctctgtaacctgggcagtaagtaacatagtgataaaaagcatagccctgaagtcagactaccttttacaggctgagagatcttgggtgggtgacactcctctctgagcctcaccttccttatctgtaaaatgctgataataatcgtacccaccgtatgatgtggtgagaggcttaactgagatgttccatgtgaggtgcttagcacagctccctgccagtattattagtctgagtctcttgcctcacttcctcttgctgtcatctcatactgtttcctctttgtgggaacagaagcagtttcttcagcctcagacctgagtgatgagggtcttggccagcacctagaccctcagagtaaggactcctaaggatcaaactgcagtgggcacctcttgtacccatctgtggtacccatggtcaagtccactgcaggaccaagttctgaccaccagagggcacttgcctactgtgttcatcccagaattaggctgtagaattcttgggaagctacatctttccagaggctgagactatgtcacggaactggcaaagaagggctcacccagatccttgaggcacttcaaggatagagcaggggtcattgcccaggtctcacttccacagggcacccctgctcttctagctggcctgtcacccagaagagccactggtcactctgggttttgttccagaggcaacttcttacatactggtgggtagacctccttagtgtaggctctgaggtttgctggtgaacaattccataggaagatctgcccggagaggacagggcttggctgggcttagtctttaggcctaggagtgtcagctactgaaggaactgaggagccatgtctgacctgcaactggatggtctgcagttagataagacactgtaactgctggtaagcactcctggcctgtgctcttccctgtgctctggggaagaaagataaggagaaaagctccctacaaacttgatgttgtctcccaaaccccaccccagggtatgaaacccagatacagggtttcagagagggagtacctgggtgtaccagaggccaaacctgtggccaggtagatgaggtgctagtggtgctagctgtcatgagagatgctgagtgtgccccagacgggccatgagaggagctggctgagcagggagatggggctgtctggggtatgggcaggtattaggatttcgctgatgaacagagagagcagcaggaaggcagtggcacagaagtgtggttggtagggctgaggatggaatcccagaggctttgtgggtgaatggaggtggaaaagccaggctgaaaggctgacactcagggagagagggcaggacaatctgtgaccaacagggagggtctttgacaagagggcacttggaggtgctgcattgatgagcatctggaattagcaccaggagaataaagagccaatgctcctggaccatggacagaggctgggaaaaccccttgggaaagtggccacattgcacaaggccggccaaggctgacagcagtgagtggggccaggtttgtcaaagcagccagagggggatgaagtccaagttggcacgtgccaggccccaccaagggggaggccaagctgagcagcatcggtcatcagctcagtacagctgcttgaggtaggaggttggggccagtgatcccagaggcagaccaggaagcaaagccacaggcaacatggagctggggagtgggtcagggatcaccctctagtgctggcataggcagtagtacagaccgggctggtggaggaaggggaggaactggagcttgaggcaatggcagtggccagaggggtggtcttcagcctggtcagggggactgtgattctgaagcagaatcaccctggctctgagaaagttggtcgtggcccggaaggactcatgagaagaagagtaaacagagtggacttctgacatcaaggctgagcttgtttggatgttaaggacccttttgatggttggcatctagaaaattatgtctttagagatgctgcagcagctccaagagagtatccttgcagggcccagggtggtgcagcctcagagagacggggtgagggtcattccgaatagctgacctgagagtctttaagagagtcactttaccagcaggagtgaacactgtgtgaggagtcaggagatacggctcaccctcttgactctacaggctgtcagaaggggcccggagtcctgtctactctgccagccagtctcctgagtggtgtgggtatgcatgggcttcgggaacagtttagtcatcctcgttggcctgccagcctctgcctctgctttccagccctcacgcccgatgtcgtgcaccagtccctcttcatgtcagccctgtcggcccaccctgaccgctcactctcagtgtgctgggagcagcactgcaagctcctgccaggagtagcgggcatctcagcctcgacagtcgccaagtggaccatcgatgaggtgaggagcgagggcccttctttatccttctcttcctctcctcctccctctcaccataccctggtggaaaggcccaggtcaggtagaacccggtaccactcctggcactacctcttgctcatctgtcctgtgcacagtcccttctagctgcccagtaggggctgactgagacccttcctgataggtccattatggcagagggggcgggggctgtgctgctgtttcagccagaaatccagcaggagaggcaggcttcggtcccaggcctcagaagcaaggggcccaacttggcacatctgccagcatagaaaccctaggatccttttaggctggtgagaaaaagcagcattggcacagctcagaagcacctaggctgtggaggccagctctccctacatgcctaagctctgtcccctggtcaacatgtcatctttggtttccaaggtcttcggctttgttcagaccctgacaggttgtgaggaccaagcacgcctcttcaaagacgaggtaaggtgcaagtgcagagtgggagacagagccggggtcactgtccttaagacggcaggaagcaggtgccctccccagcgtcacttctgctaaggagggacccgtgttgccccaccaggcaagaatagtcagagtgacccatgtatctgggaagactctagtctggactgtggcccagcttggggaccttgtgtgctcagatcatcttcaggaaggaaaaggcatcctggagacaggagtccattcactcctctgctctctacccactcatttgcttgccaaacttagctttgccagtgatagtcaatattaaagtgtacttttttcccctttaatccaatatagttgataattaaagtgtattttgaatgacacagatattgtgatttactgcaaggatcctaacacacacttaaaatcaagagccaaggagtagtgagttgtagataaaaaaagaatgtcagctttggagacagtctgggtttaaatcccagttctgtcaatttgagctgtttactgtctctgagcctacatcttcttgtctgtaaaatggagataaaatgggtttaatgaggtctaccttgcagagccattgtgagcattggaaatgatgaatgaatcataccagaacgtctagtataattacagtcatgcattgcttaacgatggggatacattcttagaaatgtgtcactaggcaattctgtcattgtgtaaacattatagaatgtacttacacaaacctagatgttatatgtatttttatttacatgtatattttcacatgaaataccaaatgtcacagcattattactgaatgtcagtcatttcccctacttgatctgcaatgccaatatcaagggccatgtatcaggtttctgtatatgttccactataatcttatgggaccatggttttaaatgtggaatcattgacagaaatgtctttatgtagcatatggctgtgtatcactagtatataatagagcaatattatggaggaatatgtagatccaatcactttacctatacaaaatgactgctatggtgggaacacaataaacaccagttttgacttttagtgcatagttgtccttaagtaaagaactttgtcggccgggcacagtggctcacgcctgtaatctcaggacttcgggaggccacggtgggtggatcacctgaggtcaggagttcaagaccagcctggccaacatggtgaaaccctgtctctactaaaattacaaaattaactgggtgtggtggcatgcacctgtagtcccagctactcgggaggctgaggcaggagaatcacttgaacttggaaggaggaggttgcagtgagccgggattgcaccactgcactccggtctgggcaacagaacgaaactctgtctcaaaaaacataaaaagaaagtagttggctcttcttgccctggaagagtgtctgtatccaagcccagcacagccagtttcctcctttgagctgtgtgtggtggagctcccaaactcctcccacttccaggtgctttccttgccctctgtgttggtgatcttctcttcatgtacgtgtccagagctgaactccctgttttcgatggcctctggccaacatagaacacaccggggtgctgctcccctagaagtgttttaattgagataaaatgcctatagagagataggcacacatcttgaaagtacaatttcacaggttttatgacatgtctgcccttgaactcaacatttcaatcaaggtacagacatttcctctcgtgttaagtcatacaaaaaaaatttaacaaaaaaaaaaaaaaaaaaagaaaagaaaaagatacagacatttccctcataccagaaagttctttctcagccccttttagtcagtccgcaccccaaaagacaaccacttttctaatttctagcgtcatagatgagctttgcctgttctggaactcatataaatggaatcatagagcatgtactcttctaggtctgtctctgcacagtgtcatgtttttgaggcttctccacgttgttatctgtatctgtagtttgtttattgctgactggtgttccatttcatgagtataccataatttcttgttaatggtcaacattagggttattttctcttcccctagatttgaaccctatttttttgttagcaaaacttaagtttgccctagctttattatagccacatcacactagtttggggttcataaaagcccccaggtggttttcatgtcaactacagtcgaaccaaattttccagtgagtacttgcaccactgagtttttttttttttaataacctcatgtaaaactttacatccaccctattaaatgttatctggttggtttcatagccttgttttaaatcttgattctgtcatctacgatgttaataaggctttccaacctcatacagcttgcacatttgataactaagccttctgtgtctttgtccaagtcttaacatgttttatgagaaggcagaaccacgtggcacgctgtttcaaacctttctgtcggttgaccacaggtcttcgaatgtagttgttcagccagctgcagagccacccaagtttcatcctccagcctatgcttggctttacattctcttcttcttgtgacaagggctgtgtctcccaggaacatttgctgtgtctcttggttcagcatggtctgtgatataaaaaactagtggccaaagggaggtgtactggtagactgccagcattaaatagaatctcagagtggagcaggacctttatggggtctgaggatcaccatctccagtgtctggcccatgtcatcagtttccccatgtaggacaatgctccaggagtgggctctctctggcttaactgatgattgggtattcagggacaccagtcaagatgctctccatctgggacacagaccagccagtagagggttgcttcatgagtgaggaattagagcaaagtgcatagatggtcttatggttgttctgtactggtggccctaaaagtagtctgtccagtcctctctttgtcatctttattgtagccattgtgtatttgtctaattcatcagcaaataattattgatgtctgctttgtgcctggccttgtataaggtgatgtgatactgaagcaggtaagaacaggtccctgctcttaaggttctctgcatggtaggggagacagaattgtaagttgttgctcctggtggagtgtggtaagggccgtgaaagacacatgtgcaggtgtcctgggagcccagaggaaggggaggacagagaggggccagtgggctctactaactgtgcagccagatgtttactggcagcttcctgcttcccaaatgtctgattttcttgggctcctggtagaccacacctttctgctgtgaaagcatagaagtcccagtggggttttgaaagtgccaattaaatcttagcttgacctgtgttaaacattccatgtgtggctctctcaagatctatccagatcacctcaattttaggaaattccctggacctctccacagcactgcaggctgttgcttagggtggattattgtatggcttattttatccattttcctgttgatttcctctaccttcaaggtcagaacatgacccttttcctgatcatatgactcaaaactccccatacccaccagcacacagacaacatcttagattttctgaggtcattccattgttcccttacctagtctcagactgccagaccacagactctggcctttgctttgaagaacctggaacctgggctttggcagttaccgtgggtgagaaatctcaggcgatatacaaggaaccatataccagtgggttctctgaatgataagaactgaaatcctgaccggggcggtggttcactcctgtaatcccagcaatttgggaggccaaggcgggcggattatttgaggtcaggagttcgagaccagcctggccaatgtggtgaaacccagtctctatgaaaaattaaaaaaaattagccaagcatggtggtgcatgcctgtagtccagctactcgggaggctgtggcatgagaatcgcttgaacctgggaggtagaggttgcagcgagctgagatcgtgccactgcactccagcctgggcacagagcaagactctgtatcaaacaaacaacaacaacaaaagaaaataaatgaactcctgtaagaatccatgcttaactctgccaggggtttctttccttcatatcctgaacttcgagatctccctggccaggctttgtgattcaatgggaccatcaagaaggagccccagaggccaggcatggtggcgcacatccgtaatcccagatgtcaggagttcaagagcagcctggccaacatggtgaaaccctgtctatacgaaaaatacaaaattagccgggtgtggtggcacatgcctctggtcccagctactcaggaggctgaggcagaagagtcacttgaacccaggaggtgaaggttgcagtgagctgagatcatgccaccgtactccagcctaggtgacagagcaagactcagtcttaaaaaaaaaaaaaaaaggtggggagctccagagccagaccggcatgaggtgtctgaatctggatgtttctgcacagacacatctgctgggggtcagcaaagagagctcctcaggtccaagggagctgcctcctgggatgaccacttggcatccccctcacagctcccagtgtctcaggcaagcagtatctccagtgcttccccatcgaggaggtgctggagagagaatagagtggcagactccttgagaaagggggaaatgggcttattcagcagaccctggtcttagacctgagaagccgcttttcacttgaggggtcattttagagcattagaaaggaagcttaatgcaggtaatctcatcggtgtgtttggctactagactttcattttcttttgggggaaaggtttttagccatcagaagtgccagttttcagagcctccttggttagtgaattgggaaagatcaggtaactgttttctcagagctgctggggggacagatatatggggttcattcccccactctgtcctgcctccgtttaacctctaaggttgccagcctctctgagatacagtcctgttgtcgccacacctcagagatcctttcattcattctttctggatttactgagcacctgacttatgtcaggtaagcagccccctggtggtcctggaaggcaaatgaagaaatacatacaattcaggggagtttgtggaactgtgtgaactccagacagagtggaaggagtgggcagttctgactgctggggaagcatgctgacagtgggcaggccttcctggcaggggtggtagagggaacagagctgcaaggcagaagacacccagttattggggaagggtctgtagtgcagtctgtggagctaggtgtgaggagggctcacttggaactgtggggcagggccaggcttgggcagcattgccccctgagctgcatgagtcatgtccataggatacccctacccagctctcacagtggttaggaacacaggtcagcacttataagctaggtatatcttgggcaaattctgtagcctgtctgccttggtttcctcatctgtataatcgagataatgctggtattgcttcatagggttattgtgaggattaactgagttaatacacaacaggtgcttaggagcagtgcctggcacgtaagaaacaacatagaagtgttttcattgctatgatgcttgaggggtgagcataggagggatggcgtctcctcaaaaacagcgtcccccagctcagtctcttgacccccacagcctgcctcccagctctcttcattctatcctgtcctccacaactgaccaactgacttccctccttgactctacccatatacctagctactagaattaacaattactaatattttccatatttgtttcacctatatttggatgaagtaattttaagtaaattttagacatcatgacatttcacccctgaggacataacttgcatctctaaaaactaaggactttcttttcataaccacaatattgttatcccactaccaaattgcaagtaactcctttatatcatccaatacccagtctgcattcatatttcccagttctcaggatacattttgcagtttttgagccagaatctgaacaaggcctacataattggttttggtttttatgtctcttaagtttcttctattctagaagagcccctcccatcctttttttccttttttaatgacttttttttttttttttttttgagacggagtctcgctctgtcgcccaggctggagtgcagtggcgcgatctcggctcactgcaagctccgcctcccgggttcacgccattctcctgcctcagcctcccgagtagctgggactgcaggcgcccgccaccacgcccagctaattttttgtatttttagtagaagcggggtttcactgtgttagccaggatggtctcgatctcctgacctcatgatccgcccgcctctgcctcccaaagtgctgggattacaggcgtgagccaccgcgcccggccaattgacatttttaaaagtctttcagagtgtggttttttggatttgtcttgttgctttctagtggtgtcacttaacttgttcctctatcccctgtatttcccatgaactgaaagttagatccaaaggctgggttagacttaggttaaatttctcactgtcactgtctctgtttctctctctgtgtctctctgtctccccctgcccccctctgcttttggcaagactagttcctaggtgatactatgtactttgtactgcctcatgttggaatgcacacagtgtctgcttgtcttgctgttagcagcactaaggttgaccaatgaggtcatgtggggacaacaagagcaggtttctcaaagccagtgtctgtgaggactcaaaagacattttgcggatacaaatgctaaacctcagaccagtcagcagaaagagagaaagagaacaagtgtgtgaacacggggaaaccagtggctgtctttctttccttctccgtccccattgctgtcttccttttttcctttctccctcccttctcctttctcccggtcctttctctccccttctctcctccttccctttctcccgcatatcctttactcctactcccctcccccattccccatgcacacccctccctttccttcacccctgccccgtgaccctttccaccttctccactttccacctccctcccgcaacccctcagatgattgacggcgaggccttccttttgctgacacaggcggacattgtgaagatcatgagcgtcaagctgggcccagccttgaagatctataacgccattctcatgttcaaaaacgctgatgacaccttaaagtgactggcccagggctgggccctcctgcagcccctgcttggcctccctctccagctgatgctttcttcctgacctgaattcctcataccccacacgtccccatgctccacctatatctgaccaggctggtccttcttagagggtgcatgggagctgaggagccctggggagggtaggcacccagccccaagtcctagagctcattcgtcaccaggcatgttggtgagggcgtgactggcaggggcattactcatggagtcagttggactgtggcagcccccacagccccagtggacttttattgtattaccaaagggtctttttcttggcagtggaggagagactagtagagcagcagtccttcaatctgaggcccctttcccttttttggtatctctgtgtacttttctctccttggctcctttcctcctgccaagaagtgaccccaccacaaatgtatttactcctggaggtacctcctctctttctgtctgctggttttgctgccctcattctgctgcttcgtttcctgggcagtgcccccagccagaccccactggctcttccccctgagatatgtgaacctcggaaacatgttttcctaagatcccttggaagtctctagctgcctttctctcttttgcccagaattgagagattttgagccaagatgccttcctgaacttacccagttctggaccagttggcattttagtgtcccacgccaagtccaagtttcagcagaatgagcaggtggtttgagcctgttttatagatggcagaggttgaggttccactgctgttttccatacacccttcatgtgttgagtctgggaaggagtaagcctagcctgccagtagcctaggttaggagaccagcataaggatttgttagacaatctcgggtctttggccagaggggcagctccagcaggcatagtggtgcctgaagttaggaatactgtactctctgtagctttggacctcagccaaggtattgcccatggggtgatggctccaggcctgccaggccttctgccatgagaatgtagcactctgtgtagcacacacccccatgacatcatttaacctgtcccttaaatgttgaccattagctcttgcagcgtcttacaaagacgacttgaagttgggagttaggaaggtgaacttttctatctgaattctccgggtccctgaagccctccttgccgctctccatctgtcttgcactgccagctgggtccctgctggggctctgggacttccacttctcagtccacataggaacccagcttccactgagtcactgccaaacctgcctcccagcctgggtgggaagggggagagccactggtaggagccagccccacatggaggtgaggagccactgccaacctcccgtgtccaggtgctgatgtgggcctgcggagtgtggggctggtgccttcacccagaccccttcaatcatgtgatgtgtgtgtgtgtgcatgtgtgtgtgtgtgtgtgtgtgtggcactctcagaagtgtttgacagggtgcagatgtgaggcttagtgttgggaaaatgccaagggctattatcattaaaatttgaagctttatttttcccttagaagtgggaaacccagagctctgttgatttcctaccacaacccagtaggggcctctctctgccatgggctggacagctttttgaggaagccattcagctcccacagttgagctcccacagggctttaggtgtccattccctctcaactgcttagaggcagctttgagcacagccttcctggaaggaagctaggcaagacctgccacacagcgaaggttgggtttacaagggtgacattggtacccccttggccaagagtaaagaagaacaagtctaagccttgcttttatcttagttgtctgggtggtagcagaactcatcagctccttatcctcagtctgttcctctataaaagatgagagatgttcactgactttgtgcagtgagaaggcagcaagtactcacggctggtgctgtgggacctcacagcttctaaggagaggggctgggagggcctttgccatcagatctgccaagcacctaatgcttgcctgtggtgaaggcaagatggaccaagggccttggagaaaagggctcccaggcttctgaactttgaggcctcagcactttctgcattatcgtcaaactctttggaaagaaaccaaatcattaaaaagtagaaagaaatctgcctcttgtctgccctactgcccctttacccccactctgtccccaaatgatattattgcaccttgacctgggagcgcagagaggggagggagttggcagagacttctggtgccctctgccctcctagcaacagatgccacttatattttggcccctggcagcctcgcccagcccctgatcagcccaggcctagggcagttaggacctttctgtttattttctgaagcagagagaatgatctcagagtttgcaaatgaagccttttttgcactttcattcacatgcactttggtggggttacatttttgtacttgcctcttgtgtgtgcacatgtgtgtatgtgttctttaagagaatcttctggcttaagctaaggtgactcttgaaggagaaaaagttacaaacaaaatgtggtgtgatctgtcagtgtatcaaaacaacataaataaacttgaacaactgatacgcagccagagtctgtttctattttcatgataaaacatccagagaacacaaaatggttatcagtagtggcactactgaagagactaaagtgttctctttgttgttagttaggggtccttatagtttttaaggaaagaaacaaaggataaggataaatgggtatctgtctgcactgaaagtgtaaacagtgggaactcccagagatcggtgtgtaaaagggcctgatccttaacatttgataaatggtcaagggcagaaaattcaatgaaacctgtaatttttaaaataataatatcagctgggcacagtggctcacacctgtaatcctagccactttggagggccaaggagggaggatcacatgaggccaggagttcaagaccatcctgggtaacgtagctagatcctgtctctataaaaaaaaaaaaaaaaaagtattttttatggtggcatatgcctgtagtcccggttacttaggaggctgaggcgggaggatcacctgagcccaggagttcgaggctgcagtgagctgtgattgcaacactgtgctctatcccagtgctcaaataaaaaatgaaaacatcaaactttcagatggggaaatgtcaacctgaacagttagattttgttaagcttcccagagactacaagcaggtgggaaggtggcacctttcccaccttaaagtgtttgatcactttaactgctttctcgtcaatatccttaatttctttgccctgctgctgttccagatcacttgtctagaagctccaaccatggagctgtccgagagcgcatcctctccacaccacaactgggaacctacctgaccgagattggtgccatgatagactggtagaccctggcttcaatgtgaactgaaccctcagggctacccaggaagcacgtagggtctgggggctttagctctgacttcccttttcatgcttctcaaacctcctaccccattgtcttgacagatatccttaccatccatgtcacagagaaagtggaagtcataggaagaaacaccttcaccttcctgccgtctcatctgcatgtctcctcccacccccattcattctgtttctttcctattacagtggaagacttgatgcttccaacttgtcagaagctaatcttctactagccatagctgcaataaaaggaaaagaaacattaagagacaggaagaggcttttggacatttaaaatgggattatggagataaaaattcaacacaagggtcaaaagataaagttgaggacatttcccagtaggcagaataaaaagaaaaagagaggccgggcctggtggctcatgcctgtaatcccagcactttgggaggccaaggcaggcagatcacgaggtcaggagtctgagaccagactgaccaacgtggtgaaaccccgtctctaccaaaaatacaaaaattagccagacatggtggtgcgctcctgtaatcccagctactcaggaggctgaggcaggagaattgcttgaacccgggaggcagaggttgcagtgagccgagattgcaccactgtactccagcctgggtggcagagtgagacttcacatcaaaaaaaaaaaaaaaaaagaaaagaaaaaaaaagaaaagatgagaaatgggaaagaagaaaatatcagaggactagttggaggcccaaatatatgattaatagaaattctaataagagagaaccgagaaaacaaattatatcaaaaacaaacaacaaacttgtatactgaaaacaataaaacattgctgaaagaaattcaagaacacctaactaaatggaaagagatctgtgttcatggctaggaagacttaatattgttaagatgtcaatattacccaaagatatttacatattcaatgcaatccctatcaaaatctcagctgattatttttttcttgcagaaatggaaagacagatccttaaattcctatggaattgcatgaggcctcagatagcccaaacaatcttaataaagtataacaaagttgaagaacaaaccgatttctttctttctttcttttctttttctttttcttttttttttttacagagttttgctctcgttgcccaggctggaatgcaaagccacaataatcaaaacagtgtgttactggcataaggacaaatagaccaataggatggaattcagagtctaaaaacaagtccatatgtccataaccaattgaaatttttttttttttttttttgagacagagtctcgccctgttgcccaggctggagtgcagtggcgcgatcttggctcactgcaagctccgcctcccgggttcacgccattctcctgcctcagcctcttgagtagctgggactacaggtgcccgccaccatgcccggctaattttttgtatttttaatagaggcgaggtttcaccgtgttagccaggatggtctcgatctcctgacctcgtgacccacccgccttggcctcccaaagtgctgggattacaggcgtgagccaccacgcccggcctaaccaattgattttcagtaagaatgccaagtccattaaatggggaaagtacagtttcttcaacaaatgggtctggggtaactggatttatacttgtaaaagaatgaaattggatacctacctcaccccatattcaagaattaactcaaaatggattgatgacctaaatataagaactaaaactataaaaccctaagaagaaaacataaaggtatatcttcatgaccttggaattggcaatgaattcttagctatggcaccaaaagcataagcaacaaaagagaaaatagataaattgaacttcatggctgggcacggtggctcatgcttgtaatcccagcactttgggaggccgaggtgggcagatcataagtcaagagatcgagaccatcctggccaacattgtgaaaccccgtctgtactaaaaatacagaaattagctgggcgtggtggcacacgcctgtagtcccagctactcgggaggctgaggcaggagaatcgcttgaacccgggaggcggaggttgcagtgagccgagatctcgccactgcattccagcctgggcagcggtgcaagactctgtctcaaaaaaaaaaaaaattgaatttcataaaaatttaaagacttttgtgcatcaaaggacattatcaaaaaagtgaaaagcacctacaggatggaagaaaacatttgcaaattttacaagggtttaacatgtggaatatataaagaactcctaaaactaagcaacaaaaagcccagttaaaagatgggcaaacaacttaaatagatatttctccaaaaaaatacatacaaatggccagtgagcccatgaagagttgctcaacatcattagacattagggaaatgcaaattaaagccacaatgagatatcactttctacccattatgatggttataatttttttaaaaaggaaagtaaaacggtgaggctgtggagaaattggaacccctgtacattgctagtggagacataaaatggtgcagctgctatggaagagagtttggcattcaaagcgtgatgtaggctgaaaaaaagagtttggcagttccttcaaaagctaagcatagaactatcacatgattcagcaattccactcctggtatatacccaaaagatttgaaaacatacttgaatgcctatgctcattgcagcattattcacagcagccgaaagatgcaaacaacccatgtcatcatcaacagaaaacaaaatgtggtctatccattcagtggaatcttaattcagtcaaaaaagaataaagttctgatacttgctacaactggatgaaccttgaaaacatgctaagtgaaataaatgaggccgggcgcggtggctcatgcctgtaatcccagcactttgggaggccgaggtgggcggatcatgaggtcaggagtttgagaccagcctggccaacatagtgaaaccctgtctctactaaaaatacaaaaaattagttgggagtggtggcaggcgcctgtaatcccagctacttaggaggctgaggcaggaaaatcacttgaacccgggagggggagggtgcagtgagccgagatcgcaccactgcactccagcctaagcgacagtgcaagactccgtctcaaaaaaatgaaaaacagacacgaaagaacaaatattccacacatatgaaatatccaaaataggcaaattcatagagatggaaagcagattagaggttaccagggactgtgaggaaggggaaatgtggagtcattgcttaataattacagagtttctctttggggtgataaaaacagattttttattaattaaatagataatgatgatgtttatacaacatcatgaatatacttaatgacactgaattgcacactcaaaaaatggttacaatggcaaattttatatttaccacaataaatttccctttaaaagaggaagacataggatccaggaagcaagacacaccaaggaaagagacaaaggggatttgcaggccagtcaccggtggctcacgcctgtaatcccagcactttgggaggctgaggcaggtggatctcttgaggccaggagtttgagaccagcctggccaacattgcaaaacccgtctctactaaaaatacaaaaaagtagctgagtgtggtggtgcgtgccgtaatcctagctacttgggaggctgaggcagaagaattgcttgaacctgggagtgggaggctgcagtgagccgagattgtgcactccagcctgggcgacagagagactcttacttcaaatgaaaaaaaaaaaggcagaggtggggacgggtttccagagtgatgggaaaggaagggccaggttcacctctggacagctgtctaggtgagagtaggaggatgaacggctctaagaaaaatggggggaagaaaacaaactgaaactggtatattaatgtatcaagaggatattttagctttatcagagagttatatacacataattatatataattctctaataattatatatattgaatatgttcaatttctaaaaccaaatgaagcaactataaattcaggaaaagctgaaatgtgtgtttggaggggcataatctaagcattcatgttccatagtaggaaagaagccacttgaaaatgttttaaactgaaaaatggaagaataacagtataaggctattaagatacatggaggtaaataccaaagaaagcagcttaaaaagatgaggaatggggcaaggaactgatctttttcattatttgattttacactttgtacaattatcactttctaaaaatgtttccagaaggcaaactggggcccatatctgggctatgtatgagctctgttgcccaagagtctgttagcccatgtgggtaatagatttttctctggtggccctgtgtctgttattccctttgcctatgggtgaatctgcaggtggggctgggggtgggaatagggctggagccagactaaggacagaaaagtgggctgaggaatgtcaaagtgaagggaatatttctggaggtagatttccattggttaagtctcttgcttttcccttatgcctgagaacatgacttttaccttcatacccaaacaacaaagtccagccagggagggtgggaggggaaagaaggaagagaggaagatgggaaggagacgcatatctgcagtggcctatctacacatatctgcacgagtgaccttggctatttcctgcagtatcactggggggaagggcaagttcagcactgctgctagccacgttggttggcacaacttgttacagtcatttggtagagagttcataattaacccagcactcacacttaacaggagttcatctgtcagaaatactagcggaaggccacaggatattaaagcagagatgtttgctgcagccttgttggaaatattgtgaaactgctaacagtcaaaatgtccatcagaaggaacagtaaatagggaataggggttgtgaaaactccacactatgaagtgtggtgcagctgcttaaaagatgtatatatgaaaaaaagtgaattactgatggcccattttctggaaaaaaaatggatgcagttatatagattaatacatatagattaagattaatatacatatagattaagacatagacaaaaatctggaaggattgtcacccttttttttttttttttgagatggagtcttgctctgctgcccaggctggagtgcagtggcatgatcttggctcactgaaagctgcatctcccaggttcatgccattctcctgcctcagcctcccgagtagctgggactacaggcactcgccaccacgcctggctaactttttgtatttttagtagagatggggtttcaccatgttagccaggatggtctcgatctcctgacctcgtgatccacccacctcagcctcccaaagtgctgggattacaggcattagccatggcgcccagccggattgtcaccctttagttaacagcagctgcctctggaaatgagattgaagatgggctggagggaaagcttttactttttatttgacattcttctgtaagttggaattatttgatacactttatgcaaccaataccagtatgtggcgtgtttgggggttttttaagcagctctggaagagcagaggagagggagcttggtggcacagcagcagcagcagcaggagctctggaaagggcaggaccttgtgcgctgccctgatttgctctgtgcacttgggccagctacctcccctatctggaccagggccagacacatgctgctatgtgtgttggtggaggtggggtgtgtggccatgcagggctcctccggagcacagcagagcagccggtgtttaaggcaccagaattaccagaaagttgttgacattttaatggaaaggcaatggaggaagcagtgtgaaagtcagcctgctcaggaggggtcactgggcagagctttccttacctgtccaggggtccaggccctgcctgtgccctgagttagaacccagggccggccaggcgcggtggctcacgcctgtaatcccagcactttgggaggccgaggcgggcagatcacaaggtcaggagatcgataccgtcctggctaatgcagtgaaaccccatctctactaaaaatacaaaaattagctgggcgtggtggtgggcgcctgtagtcccagctactcgggaggttgaggccggagaatggcgtgaacctgggaggcggagcttgcagtgagctgagatcacgccactgcactccagcctgggtgacagagcgagactctgtctcaaagaaaaaaaaaaaagaacccagggcctgggaagctttgggtcaacccccgagaaagccttccctgttctccagggtgaactcatctctggttcctgagcctcaaatctctgaagggcagagtggggcataggtttcaactcagctgtgattctcccagaacggtgccagggcagtgcttggtcgggtaggctgtgggtggcagtcttcggcttaacacaagaaattgccagaggctggctcagggggaaatgagctgcccagtcctggaagtttccatgaaatgactgaacataggggctggtggcccccattagggaaggggtggaggagggtgttgtgtgagaccaacctttcagttgctggttcactaggttccaagcgaaagggaagatgactcagcggagggaatcagggaaggctgtgtaggagtcagcacttaagctggaccttgagagagtgcggcagttccagtgttgaaagggacttcagaaaccgtccctccagcaggacacaccatccgtcaccaattcacatgaggctcagggagctgaagtcagttgcccatggtcacataacaagttgtgctttaaaaaattcagagagtcccccaggcagggcccatccaggagccagtgtgtgcagccagcttggtaattcaggtccagtggttaattagtaactggaaggccccgaagccagcttccagcaggcagggctgggaggttgaacttgagccggtttgggagccaggagcgagtgggtgacaggtcattcctgactgggaaggttgcttgacaagtcaggattgtgcctccagtcagaaggaccatgaagagagagaagagggcagagccgtgcatggggctgctccccaggacctgagcaggaacctggagttttcaggtgagaggctcacctgtgagcaggatacctgcctgctcgcctattggtctccagattgactagttacctagctaacatctttcctagtacctgtttactttctttccttcctttcttccttggcgacttctttcccttctccctccttcctttccttccttccctcccaactatctgctttctcagctgcctaattttcttcctccttaactaaccaacttacatcctcacttccttcccactgacttcattttttccttttctagctttctattgtcttcctgaaattccaggccgtgggctttgcagtcagatggcctgggttcaaatcctggttatgtcatttattaactgtcttgatcatgtcacttccctgtccttgcctcagttttctcctccttgaaacagggacgatgatagttcctaacccgtggggttgtgggaacaaaataagatcaagttggcacttgaactgggcaggcgtgtaaatgaacaagttacagtgaagacagggacagcagcaggagagggtgcatgggatcggagggtcatctggcttccaggaaaggcaatgagaacaggtgaaaaggtgagctggaaagaccaggtttgttggggaatgttccaaggagagagaactgtgtgacactgtcccacccccacaccccatttggcagggccagggagctgtaagcaggtccatgtaacagtgggacagagggaggcaagtctgggctgtggcaagttaggaaagggacaggcttgaggactcatggaggggcttgagtgggagtttgcggagtctgaagagttaggagaatatattgatgtccagcttctggccagaaaattagaacaccgtggtgcgagagagaagaaagccttaggaactgagggctgcttaggcatgggggtcacagtcaaggtgatgggggagggtgtgatgggccatgggcatgccaggttcccaccaggaactcagtacttgaatattaactcaacagcaatatcttgagaagctttacacaatagtacaaagataaaagttaaaataaccggccgggtacagtggctcacacccgtaatcctaacactttgggaggccgaggcaggcggatcacctgaggtcaggagtttgagaccagcctagccaacatggtggaacctcgtctcgactaaaaatacaaaaattagccgagcgtcgtgacacatgcccgtaatcccagctatttgggaggctgagacaggagaattgcttgaacccaggaggcggaggttgcagtgagcagagattgcgccactgcactccagcctgggcgacagagcgagactccatctcaaaaaaaaaaaaaaaaagttaaaataacctaacctaagaacccgctgtgaccttgggtcatgaccctgcagtctttttttggcagctgtgctcacaaatgtgtacgtgcagacatgtcttttgtttttcttttacaaaattggtacccctacaacacctactattttgaaacttggttttttgcttgatattgtatcacatgtatgttcctgttttggtttatataggttttatatagtttttggttgtgtaattttccactttatatatgtaccaacatttatcaattcatttattgattcattagtcaaattgtactgggcatctactatattccaggccctgtgctcagtgctgaggattcaatagttgaacaggaagtatttgccctcctggagctgatgttctagttggagatagaaaataaaaactaataaatacgtgataaggcatcagtgctacaaagtaaaatataaagtagacaaaatgtatagggaatgagcaggactggtatcagagtgactaaccatcctggttggcccaggactatagcggttttagcactgaaacccatcagtcccagacaaaccaagatgacttgtcacccgtaatcagtacaagcctctccaagaggtgactttaagcagaagcctctatgacgttagtggaaaacagccatgcaggtgcctgggggaagagtgttgtaggcagagggaaaactaagtgcaaggggctggaggccagagagcacttagtgtgtctgagggacagcaagagaaaggagagaggctgagggcagtcaggaaggaggggagtggaagccaaggaggagatggagacagcaagctaggtcatatggatctcataaaccatggtagaggctttggattttttttttttttttttttttgagacagagtcttgctctgtcaccaggctggagtgcagtggcgtgatctcagctcactgcaacctctgcctcctgggttcaagctattctcctgcctcagcctcctgagtagctgggactacaggcacatatcaccacgcccagctaatttttgtatttttagtagagacggggtttcaccatgttggccaggatggtttcgatctctgacctcatgatccacccgcctcggcctcccaaagcactgggattacaggtgtgagccaccgcgcccagctgaggctttggattttaattctaggtgtgttgagaaaccactggagtttttgagcaactaaggcacatgatctgatttacattttaagactcaccgtggcttttcatagagaaagattgtagtgggtaaatggagaagcaggggtcagtggagaagccattgcaataatccattcaagtgacaatgggggctcaggcagggcggttgcagcaatgatggtgagcagcaatggtttctggatatattttgaatggaatttcatgatggagtggaggcggagtgagggtgcaagctttctagaatgaactcaaagttgctggcttgaacttttgagtaggcggtagtgccattattgaggctgaagactgagggaggagcagactggggcagagtggaaggaatatgagtcaagacctttgttttggacatgttaacttcgagataccagccaggcgcagtgggtcacgcctgtaatcccagcaatttgggaggccgaggcaggaggattgcttaagctcatgagctcaagaccagcctgggcaacatagtgaaaccctgtctctacaaaaagtacaaaaaaaaattagccaagcctggtggtgtgtgtctatagtcccagctactcaggaggctgaggtgggagaatagcttgagccagggaggtaaagattgcagagagcctagatcactccactacactctaacctgggctgcagagctaaaccatgtctcaaaaaaaaaaaaaaaaaaaaaaaaaaagattgagatgctttggctgggcacggtggctcacacctgtaatcccagcactttgggaggcaggggtgggtggatcacatgaggtcaggagttcgagaccagcctggccaacatggtgaaacccagtctctactaaaaatacaaaaattagccaggcgcagtggcgggtgcctgtaatcccagctactcgggaggctgaggcaggagaatcgcttgaaccagaaagcggagcttgcagttagccaagattgtgccattgcactccagcctaggcaacagagtgagactctttcttaaaaaataaataaataaataaagattgagatgcctctagacatctgactagtgaattgtcaaggaagcagttaaatatttaaatccagagttcaggagagaatcagaactaggctgggcgcagtggctcacgcctgtaatcccaacactttgggaggccgaggcaggcagatcacttgaggtcaggagttcgagaccagcctggccaacatggcgaaaccccatctctacttaaaaaaatacaaaaattagccgggtatggtggcgggcacctgtagtcccgggtactcaggaggctgaggtgggagtatcacttgaacctgggaggcagaggttgcaatgagttgagatagcaccactgcactccagcctgggtgacagagcaagactctgtctcaaaaaaaaaaaaaagaaagaaagaaaaaaaaagatttgggaactgacaagtatagttggttaaaccactaaaatggtagtgatcaactaaagaacaagtacgtgtagacagaagcccaaagactaagccctgggataggcctgtgtttaaggataaaaagaggaggaaaatccagcacaagagatggaggaagagcagtcagtgagctagaaggaaaaccaagagttcctaaagccaaatggggaacatgagcacaccaaattcttcagagaagttgaataagatgaggatgaggaactcatcactggctttggcacatagaggtcactggtccacggtttcattgaagtgttgggatgagagcccatttggaacgggctcaaaagagaacaggaagaggactggagacaaggagtccagacaactctttcaaagagtttagctgaaaaggggtacaaagaaatgggaccatatctggacacggtatatggtcaagagagggagctcttgcagctggcaagtgttctgaagtgctctgtggtgggacacttaggttactattagcacaattattttgctgttataaatagtgctgctgaatgaaggccacatcaggatcttgtttttgaaaataaatgtccttgttctgggtatgtgttttgtcaacatgacatcctgctgatcatgaattggttccacatttctattttgttcaagatggaaggctttgatactgtgcactcaggttttctctggtcaacacttccagatcctccgcatttcagaacccacagagaacccctgaggcccctgggctcagttccctccctgaccaactttctgggccctagccccatgtgtccctcccctgtagtatactgtagccacacagaaagtttgagaagggcaggggctgtgggcccatcaactcctttattcttgagaacatctgcctacccctcgggatcctggggagaggaagggaccctgtgagaacctaatgaccgccccaggcagcaaggccttcatgagccagggtgctctctgggaccgtttcttacgcagcaggagagtcgtgggccaaccaggcctgccctgaggactgggccagagcccttgaggggcccgcagggaaaggccaaaaggaccaagtgctcattaaagaccaaggcaggctggactgagctagacacccaggctccaggttccttcctctgaaacatctgcaggtttttgggaggcgaagggctctcagctgccatggctgatgtctggggactttttcttcagctccagatggtctacacagggttcgtatacacaggccccctagccgcacgcatgcgtgcatgcacgcgcgcacacacatacacacacacaccccagagtaaattcactgatatacaccactatgaacacacacaatgacttacctatacacacatattaatagacacccatactgctcttaacacacaccttcagacatccacacagactcacactcacccacatacacacacactgacacagcatattcacatacaaagatacacactgatatgtaccacacagagacacgctgaaacacatccatatgcacaccacacacactgagatacagtgacacacacagtcacagatgcacagacatatgctgatgtaaatgtacaaatgtggtcacactgacacatacatgcaatcatctacgcagactcatagaaaccgacacaaatacctgaaatacacagccacagacagacacacacggaagcactctatgcacaaaacactcacacagtacacaccatgctgcacataccctgacccaaacagtctaacaagccctgagggtctccagggctgccctggggctattgcccacccctcccaccgtccccgctagggtgagatggtgttccccagggaacagaagtctccagtcccatcttaagctctgccggatcccgcgtgacatcagctagccccctcgcggctgccgggagctgtgagctctgtgctggggccaggccggcaccaggcacagacacttaggcccttgttgggagaacagagagaggctctcttgtccactgcctgtcttcggttccaactgctggttctcctagaggcctctcctcagactcgcaggtatgtgggaccagggaggccgggtcctggccaaagggccactggggtcagcccaggagagggtgtggcagtgttgtgggccgtttgcaggagcacacacgtctggcattggctaggggcaggctgcgcttccttagcagttctgcagcttgctcttaaggcttggcagggctgggcctctcagggaagcctgggctgggggatcctctcagttccccttcactttctctgttcccaagaaggccatgaggttggtgcctccaggacccccccttgtaaagataggaaatctctactcagagaggctgggctgcagcccaggccccacagtgggccaagactaaggtcttgagatgcgcggcaactgggctttcaggtgagatctctgctctcagcctttgccaagcaaggatgagactgtggggccccaagcaatctgtggcagggcctgggcaccctggccccgtctcccctgcagggtggaagcaaggaagacactattcctggccacatagatcagctggtcacaccttctgttgtttggccccgaatagatattggccagtcttgggtctctctgtggccccagcccaaggcttccagggcagctgcctttcctgaggcattgggcagaattccttgtggcaaggagatcgtagcacagagcccagctgggactgcgcacagtaattcagggttgccattgttcctctatgggagtccggagagcccagcctgtgcttcacaaggctatgtggccctaggaaggtccttttttaggccacaggccttccatctgtgaaatgggggatgggttcagactttatgccctgaaaagatccttccagccctggccatcttggacttctggagctaccctggctcacaggggtcttgttgccctgggtgtccccagttcttgaaaagaatcagcctgggaggggccacaccctgaccatccccctttatcccttctgagatgtttgttaggaagtctgggtccaggggatatcatttcttgttccatccatgcaggggttgcttacctcgggtaggaaaccctcaggcggtggcaggtgcacaggtaggggaggatggagagggcagtggtgcctgaagccctggatgggcggagctgaccccccaacaccaactctctcatgcctgctcctccctgtccccccagagctgcctgatcattgctacagaatgaactctagcccagctgggaccccaagtccacaggtgagtggttcttggtcccccacccatcatcgggggctcacttcttcccgaggctaaggaaatctgtgggtcccagacaatgtcaggggctgagagggttactgcgagcacatagaaatgagccacttgcagggtgaatagagtagagatttgaaatagggcttcaagatgaactggaaaaatcatgagatttgtcatggagacacctgggtcgtatcccaacctggttgcctgtgagaccctgggcaactcctctctgggcctcagtttcctcgcctattcaattagcacaacagccagctgcctcccaaggctgttttgagaagtgggtaagatggtggataagtggatttgtgggtgggtagaaggagggagggagggagggaggcgggcaggcgggcaggtgaaaaaaaaagaaaagaaaaaggcaggcaggcctagtagagttgttggagaagggatcagggcctgggccaggagaaagggaggtagccaaggagtagggatctgctgatcataatcacttctttctttagccctccagggccaatgggaacatcaacctggggccttcagccaacccaaagtgagttctggtccctcaagcacctttcctacttgactcccctcatacctggctccccttgccttgggaataaaatccagattctctggtctagcattcaagactgtctgccatctgggcccaggacctttccccagctctatctcccacaaattccccagcctctgcccatgctgaaccctcttcctgcaatgccacctaaatgtctgcattgttagcaactccccacacttcaggcccttctgaggggctttgggtaccagaaccctgccttctatgcaggccttctgtgcagtatgtctggttttatctctaccctctgcctgttgtttaacttgaatttgagttcccctggggccagggtgaatcttacaagccctctttcggctgggagaacatggggttcttcgggggtgaggaggcatggctcctggaaggctctctgtatttccccattctaaagttaaaaagaagcccaggtttgttctcaggcaccaggtttccagacattgcaaatgctgatccgtgtttttccctcttcccccagtgcccagcccacggacttcgacttcctcaaagtcatcggcaaagggaactacgggaaggtgagtgacttggtgagggtgggaagcctgggtcttcccttctgcagcctcttccagcccctgctgccacttgtatgtatgaagagagagcactcgcacctgcagacaaaagcaggggcaggcgggaggccttgtactgctgttgggaagtccaaagtcacctacagggcctcaaattcatgtttcttctcaggtcctactggccaagcgcaagtctgatggggcgttctatgcagtgaaggtactacagaaaaagtccatcttaaagaagaaagaggtaccagagctcgggcacaggcatttcttcttctgcttctcaagccgcagcctagggtggctttcaaagatgggtcccacctctgacaggtccatgggcctgggtgcagaagtggtcacaacaaagggtagaggggaggtggtacgcaggatgctggcccttctcaaagaaagcaggccaagccatctcaccacagggctttcaggaaaaccagcctggctttgccttcccctgggaaacacaggctccacgatggacaagtcttctgcctgctccaagtgccaggctccccatctgtataatgtggagccccactttattctctctgaagacccttcatgccatcaggccatatggctggagtgcagtagtgcaatcacagctcactgcagcctcaaactcctgggcttaagcaatcctcccgcctcagcctcccaaagtgctggggttagaggcatgagctacatgcacagcacatcatggacttctttttttgttgttgagacagagtcttgctctgtcacccaggctggagtgcaatggcaccatctcagctcactgcaacctccgcctcctgagttcaagtgatctcatgcctcagcctccccagtagctgagactaaaggcacccgccaccactcctggctaatttttgtatttttagtagagatggggttttgccatgttggtcaggctcctggcctcaagagatccgctggcctcagcctcccaaagtgctgggattacaggcatgagctaccacactcagccccatcatggatttcttgatgcctcagctgacctgagttcctttaacacctgactccattagtaggccagagcaggcccagagagaggattgcataggaggttgggggactcagagaaaagagagattaatgttaacaaggtctccgtggggggtggaatgggaggtcttcctgagggaggcagcggtgcagctggccttgatggtgggattctgatggtctgaaaagagggtgcgacatccaggaagaggaaatagcatgagcaaatacatgaatatggatagtgtgtggcttctttcccttaggaactcagttatgtaggcatcacacatgctttgcttttcactccaagggcaagaagctctgatacaggggctagagctgtgcccacatgaactagcttaggatgaggctgaccaccctgagccctgaatactaaggaaggaacttgggcctggctctaagggcaatagggagccattgtgggtgtttgagcaggggcatgagaaagtcctgggtaggatgacccccacccacaagcttatatgggctgagccgggataaaagaggctgttgtgggctgtgacatggacccctctctttgtgactccacagcagagccacatcatggcagagcgcagtgtgcttctgaagaacgtgcggcaccccttcctcgtgggcctgcgctactccttccagacacctgagaagctctacttcgtgctcgactatgtcaacgggggagaggtgggtgggcccacagggaggcttccctgggctggctctcggctgggagctgtccatcccacatgcccactgcatgccaagttctggaatgatctcacttcatcttacaatagacccattttgtagctaaagaaactgaggttcagggaggtaatcatttgctcaaggccacccagcgcatacctggtagagtcaggacttgaattcaggtctgttagactccccaccataatgctttcttgccttcctcattcagagttgcccatagacgcactttgataggcccgggaaaggtcaatgctaagaggagctcgtggtcaaggtttctagtgctcccataggccacagggtgggattgactggtcactgtggtaaacagagacctcaaggccacctggtgacccagaagcacagctgggacaagcagagctccctcctgggcttcactctgtctctctggtcaagatgcaaaatgtagtggagctccagtcagtgaccccagatttaacctgcgtgatctcttgcctttcagaatgatgctaagaggggggtttttgtcctgcatccctaagtgaagggctttccatgccagcaaaatagtccaaaaacattggcccatgggtggatctaacctgagctcagtctgacagccgtatcatcatatcgcctggattgatggaaaagcataatctttgaaccacgcaggttcaaatgccagctctgccaattataagctacatgaccttgggcaagtcgcctaaccattctgacccctcctagcttcctcttacatgaaactagcatgacacttgtaccttgaaggttgtcatgaggattaaataagagatgtggaagggcctgacttggaacctggaacacaggaggtgcttaagcaatgctaactcatctcttcttctgctgactctttggacacccgggactgctgtgtggggcaggggccagcatgcactcttttggtaggaagaatgctgcaggtcagagagggagtgagctcgcagccgcacagggcggggagcaggtgcaccctagccctacagcagccacccaataactcctgtcacactcctcctcccctccagctcttcttccacctgcagcgggagcgccggttcctggagccccgggccaggttctacgctgctgaggtggccagcgccattggctacctgcactccctcaacatcatttacaggtgaggcctgcctgtggctcagagccaggaccaagcccttcttgctccaacagctaggggttgtgtggacactaaatcctgatgaaatcctggtggacttggtcctttgttttgggtggggttggagtctcctcctccgaggtccaagtgcccagcctttctgggctctccttctgcatctctggcaacctccatgaatagttctcctgccaggaccaccccccgcccaggtctccaactctcctcactaaatggctgagacacctcaaggctgttttctcttattttctgcagggatctgaaaccagagaacattctcttggactgccaggttggtgtgtgtgtgtgtgtgtgtgtgtgtgtgtgtgtgtgtatgtggttgcacaggtacactatctgaccatgagtctgtgtacatgggtgtgcatgcattgtacatgtatgcatataggtagaggaggcatttgagcatatgtgtgtgtgcccatgcacatgtacacacatacatatgtgcacatgagactgtacatgtatatgtgtgcatgcatgtacatagggggcaggggtggagccaggtggaggctggtggagtttgtcttagactgggctccatggaaacagactctgagatggagaggaggcagaagctttattggggaacattctcaagagataacacttttaaaggggtaaaaaaacaggattgggcaaaggaagaagctcacctgcattgtagttaccagtggggcctcagctgatcttgccggcagggggagggcctgagctggggtgggtctctaggattgtcccaaaatgagacaaagaggatgggcctttgtgcccctggacatggattgctcctagggacggggcataactttgggtgcgggcaatgttctagcagcagggggatggggataggcatggttcttctgtagcctggtttcagaagagggatccaggcagaaccccacagtatctactcattctaccttcctgcccagctgccacaaggtgtgattgctttctgagtccccagcctctgtctaggggttttctgtccacaagctgccactgtcgtaggggtgggtctgagtttgtgatgagctgtgggcaaacagtggaatgcccacccggccccctgtgctgctcctgacatccagtccaggagccctgtgttggagtggagcctccagcctgtgcctgggcatcagatcccacagctgctgccctggggtgtggcatctgggctttgggggttaggcctggccatacccttggctcataccaccctccagcccatgccctccgtcattctcagggacacgtggtgctgacggattttggcctctgcaaggaaggtgtagagcctgaagacaccacatccacattctgtggtacccctgaggtaagcgtaaacatcccaggagaggggaggtcatgagtgggtgaggccacagctcctgattagagccaacaggttacagtgaaggggactcactcctttgacccaaacacttctcctgagtgggctatacactgaactgtggtttcctcatctatgtaatgggggtaccagctctaggactgctgagacccagccagctagctgctggtgaagctctactgcagtgctatccagtagaaatagaaatagaaacgcaggctgggcacagtggctcacgcctgtaatcccagcactttgggaggctgaggtgggcagatcacctgaggtcaggagtttgagaccagcctgggtaacatggtgaaaccccatctctactaaaaatacaaaaaattagctgggcacggtgacgggcacctatagtcccagctactcgggaggctgaggcaggagaatcgcttgaatacaggaggcagaggttgcagtgagccaagactgtgccactgcactccagcctgggcaacaagagtgaaactccatctcaaaaaaaaagaaaaaagaaagaaattcaaaccacataaacactttaaaaacttccagcagccacatttaaaaagtaagaaagtaacaggtgaaattaattttaatgatgtattttatttaacccaatatatccaatattctcatttcaacataccatcaatataaaactggttgaaatattttattccttttttttttctaactaagtcttgaaaatctggcatgaattttaacacttacagcccatctcaatttggagcagccacatttgaagtgttcgatagccacgtgcagccagtggctgctatattgtacactactgatctgcagggtgaaggccacgtgcaacaagagggcctggcctgagtgttaagacctgggctggcaagtgtaaaccacaggtccgtgtccatcttccagctgccaagagcctggagggttacaatttgcagatctcagcagtcattcagacatgtctatatgtcctgccaaggtctctctgcagccctgaagttaaaacctttctttgggccaggcgtggtggctcacgcctgtaatctcaacactttggtaggccgaggcaggcagatcacctgaggtcaggagttcgacaccagcctggccaacatggcgaaaccccgtctctactaaaaatacaaaaattagccaggtgtgctggcaggcacctgtaatcccagctactcaggaggctgaggcaggagaatcgcttgaacctgggaggcagaggttgcagtgagccgagatcgggtcattgcactccagcctggtggacaagagcgagactctgtctcaaaaaaaaaaaaaaaaaaaactttatttgaactcccaccagtcttggaccttggaccttggacctgaaggggtccccagtggctagacagacgtcagggtgagggttggagggctgaggctacagactgggagactcctccccacctggcatgagacaggacctcagctgctctctttttctccatatgcttgaaaagctgggtcttagatctaatggcctcctcactttagttctagggtagctgatggtcggatgaactctctgagcaggagccatggtctgtgtttgggtatggtgggtggtgtttgctggataaagccagcgccccaaagcctgacagtccagccatcccttccttggacgttgctagggacgggaacaaaggatatggaaccccagctcatgtaggagacatgtggccccaacacatcacctttaccacgactcagccactgccatggtgttggggggcacaggcaagagtagccatggttgctcccattgtttgagggccagcacatatgttagcatcttagaacagcttctagcagggatttggtatcttcacatttttaggatgaaaaaaccagggtctgagaggttaaatgccctgcctgagaccacgtaccaaccacggctcaggtctgtgtgactctgcccttccctagaccccacacagtctctcagagcagcttttcctgttgctgagaccttgcccccgactcggtggcagagacaccaggctaagaagtcagtaagcctcttttttttgttcccaggttctcttcctcatgcaaggcatagagacatggtgtacatttatttatcaatagctcaggggtcaccccctccttcctgaccctctcgtctgaccctagggtttccagcacaaggatatgccacatgtacttttacttacactcacattagtctccacactgccctgtgagagtactcccggggccttccgttcccaggacacggatagccagttgaatgcctttgcaaaaatagaaaaaggcatcccctccgggcagactaattagaaaaagcaccccttgaaacaaaaataaagttgccggataatacctttgaactagtgttgcggcttggtgagtggattacagccatgagtgcagccccctttacccttttggctggtgcttttgtgtggtacacaccatgtaaattgcacaaagcagtcctggctgacctcttctacatccccaacccatggcaaagggccctgcagaaagcaggcctttgctgaatgactgatgcatgaacacacacacagccacagagcacacgtacagcagggtcagctcttggtcatcttcctccaagtgccttatttacagctggggcaactgaggcttaacgacttatttcaaataagtgtgtttccttctaacagtacttggcacctgaagtgcttcggaaagagccttatgatcgagcagtggactggtggtgcttgggggcagtcctctacgagatgctccatggcctggtgagtcaggggtagccatctacaagggccatctggctagggatgggtctgtctctcatgtggtctacacaagctctgtccaggaaaatgagcaagccatctcttcattccagactaaaaaagataacgccaaggtgaatatgcaaattattatttttttcaataatgttagtttaggccaggggcggtggctcacacccataatcccagaactttgggaggctaaggcaggtggatcacctgaggtcaggagttcaagaccagcctggctaacatgatgaaacaccatctctactaaaaatacaaaaattagctgggcgtggtggcgggcacctgtaatcccagttattcggcaggctaaggcaaggagaatcacttgaacttgggaggcaggggctgcagtgaaccgcggtcgcaccaccgcatatccagtctgggtgacggagggagactctgtctcaaaaaaaaaaaaaaaaaaagttagtttacaacacactgtctcaccttgggtgcctcaaaatagcctttggaggctgacacagcaggaaatggagttattcatattttgctgatagggaaattgagaccaagagagatcacagtcctgataggttgtggagccaacccctgaccccagtcctaggctgcctgcttaggtagaggcatgtgtagatttgccctaggccatgctttgctttgaagtggtttcaccagcatagcttggtccctaggaaggaacaggctctgtggattaaggggaaggaacagctggaagaggtgtgggaggaagaatagtaagaaagagaaggggaccctggatatggtttggggcctggctgtcttcctaactgtgccacataattgctctgagccttgttttcttacctgaaaaattacaactctcttggaggatggttatgaggctggggtgaaatgattaaggtgaaagtgcaaatgttgccaaatgcaaagttggtgcataagctagatgaaaagagatgggcctcacgctggtgggaagagacttctgaccttcctagcaactctctccatgtgccggaagcctggagtcctgtctctttccagtctgccatgcgagccattgcacaagacaggggtcatactgaatcctcccagccgcccaccttgctccaagtctccccgagcctgtgttcactttgcatgggtgatcctccagctgttctccctctctccccagccgcccttctacagccaagatgtatcccagatgtatgagaacattctgcaccagccgctacagatccccggaggccggacagtggccgcctgtgacctcctgcaaagccttctccacaaggaccagaggcagcggctgggctccaaagcagactttgtaggtgacctaccagtggagcactggcccccatggggctcgcagcttcctgcagaggcagctcagaagcacattaacacgcatcctgctgccttctaaaaccaggcactgctcacttgttcatttggaaattcactactgctactagctgactactttctccagtctagttctcttagtcaatcaatatttactaagcaccaactatgtgccaggtattgagctaggtgttagggattcaataggctgggtctctgcccttattaagtttggggtgggggccgggtgcggcatacacgcctgtaatcccagcactttgggaggccagaacgggtggatcacctgaagtcagaagttcgagaccagcctggccaacatggtgtaaaccctgtctctactaaaaataccaaaaattagctgggcatggtgttgggcacctgtaatcctggctacttagtaggctgaggcaggagaaccacttgaacctgggaggcggaggttgcagtgatctgagatcgtgccattgcactccaggcagggcaacaagagcaaaactccacctcaaaaacaaaaacaaaaaaagtttgggattgggggcaggcaaaaaacccaaacattatatacaattatcacaaggtatgacaagtgtcaggaagaaaatgaataatgagctgagatagacaataatgggagggggggcaaattaatagcggcatgatcagggagttctctctgaggaggtgacaattaagctgaggcttgacggatgagaaagaggcagccatgaagacagctgggcaaaggctccccagacacaaggcacagcatgtgcagaagtcctgctatgggaacaaggaggagagtggccagttttagggtgttttgagcagaggtctggcatgacctgatttaagtttttagaagattcctcgggcttctttgcggagagtggactgcactgcatctgctttttttttttttttttttttccgagacagagtcttgctctgttgccaggctggagtgcagtggtgcaatctcatctcactgcaacctcctcctcccgagttcaagcgattctcctgcctcagcctcccaagtagctgggactacaggcacccgccaccacgcccagctaatttttgtatttttagtagagacggggtttcaccaagttggccagatggtctcgatcttttgaccttgtgatccgcccaccttggcctcccaaagtgctgggattacaggagtgagctaccatgcttggcctttttttttttttgagactgagtctcgctctgtcacccaggctggagtgcagtggcacgatctcaactcactgcaacctccatctcccaggttcaagcaattctaatgcctcagcctactgagtagctgggactacaggcacccgccaccatgcctggctaattttgtatttttttagtagagacggggtttcactatgttggacaggctggtctcgaacgcctgacctcaagtgatctgcccgcctcagcctcccaaagtgctaggattacaggcatgagccactgcgcccagccagcacttgctttttacaaatatctgagtacttcttccttgccagaccccaggctgggcaaatgggatatagggataaatgattcatagtccattcttagcaaattcattatattcattcattaaagtggcactttaaaaataatcctactttttttattcaacacaaggtaatttggatttacaaaaagaaggccgcaatattttctcaccaggagtttgctttcttttctaacatagtggttaagatgaatggactaggccaggtgcagtggctcacatctgtaatcccaccactttgggaggccaaggcgggcggatcacctgaggtcaggagtttgagatcaacctggccaacatggcgaaacccggtctctactaaaagtacaaaaattatccaggtgtggtggtgggtgcctgtaatcccagctactcaggaggctgagacacaagaattgcttgaacctgggggtgggtggaggttgcagtgagctgagatgggcaccactgtactccagcctcggcaacagagtgagactctatctccaaaaaaaaaagatgaatggactatgaggcaaactacctgggttcagcagatccctccttcactgcttactagttacaggaccttggacatgttgcttaatttctgtgagccgcagtttccccattgtaataacagcacctaacacagctgttttgaagatcaaatggattagtattaatgtatgcaaagtactctcagcagtgtctggcacacaataagtgctttttaagtgtaccaaaagctttacattccagttactgtaaatcgtaacaacagttagggcatctgctgcctattcctggccagcttaaagaataggggcttccgtgaagatgtctcctgttccaagcaaaaatttgtatcttaaaaaaatatgtatgactcttaaaataagttatacattcacatagatcaaaattcaaagggtacaaaagagtatctagaaaaagtccttccagccacccagttcctcaattcagaggcaaccaatgttaccaatttcttgggcattctttcggaggcttttttttttttttttttttttttgagacagagtcttgctctgttgcccaggctggagtgcagtggcatgatctcggctcactgcaacctctgcctcccgggttcaagtgattctcctgcctcagcctcccaagtagctaggattacaggcacacaccaccacgcctggctaatttttctatttttgtagagacgaggtcaaccatgttgaccaggttggtcatgaactcctgacctcaggtgattcacctgccttgacctcccaaagtgctggcactaccagcgtgagccactgcacccagcctcttacggagatattttggatctgggttgttaaccagcccactggggttcctgatatagggaggtggagaataattatttgagaaacacagatagaggatgtgatggaaagaagttggtgccaatgttgattttgattaggaaaggtggtgaatcatgaccagggctgagtcctaaaatctgggtgtctgggaatctgaaggtcttcttgggggctttatttttcaaaccttccctagtgaattgatttagtctacttctctggtttgcatactggaaaactcaagatgtactgaagcagagtgaggggaggggtctccaagctcccactggtactcccccacccccagagcagattctgatgtattattcactgacacccccaaagcctagcaaagggtcggtgcccagagaagatgctcagtaaatagttttggaataaacagatgctgtagtggggagaagggtttggattctggatgatgggagaggcttggctgcaaaactctcttgtcccaggaaactagccagaactgcaagttaatttccagttgacagccagttgcttgtggagctctggaggatgtgggggtgaggtgagagcacccatggggagggctacttctaaccagaaccttttttctgcacttcctgcagcttgagattaagaaccatgtattcttcagccccataaactgggatgacctgtaccacaagaggctaactccacccttcaacccaaatgtggtaagaggtcacagcattctagactctggatttccggggctgggggagcttgctatgcttgccaactctccttatctagatggaaaacttgggggtccaagaagctcagtcatttgtcctaggctacacagtcagttagagacagaactgggcctgactacaggtgcagctcttggataaacagccatgttgctgctcctttgtcttgagcaccaataaataactctggctgcagagacttttacagtttgtgaagtgctctgtttcgcacagcacacccacatagggccaagccctttagagatattttatccttttctatttatagactttttcctgataataaaaatgacatatatccttataaaaagtatgtaaaacactggccaggcacagtggctcacgactgtagtatcagcactttgggaggctgaggcgggtagatcacttgaggtcaggagtttaagaccagtgtagccaacatagtgaaaccccatctttactaaaaatacaaaaattagccagacatggtggtgcacacctgtaatccctgctactcgggaggctgaggtgggagaatagcttgaacctgggaggcaagggtcacagtgagccaagatcatgccattgcactccagcgtaggcaacagagggagacttcatctcaaaaaaaaaaaaaaaaaaaaagggaatgtatgtaaaacagaaaagtttaaagtagcagtggcgaaatgcttattatctcactacttaagggaaaccactggcatatttccttccagtcacttttctatgtgtttttttttgtttgttttgttttgttttttttcttgagatggagtctcactctgttgcccaggctggagtgcagtggcacaatctcggctcactgtaagctctgcctcctgggttcatgccattcttctgcctcagcctcctgagtagctgggactacaggcgcccaccaccatgcccggctaattttttgtatttttagcagagatggggtttcaccatgttagccaggatggtctcgatctcctgacctcgtgatccgcccgcctcggcctcccaaagtgctgggattacaggcgtgagccaccgtgcctggcctgttttgttttgtttttaacctaattaggtcctactttatagtatctatatgtgtgtgtgtgtttattcatctatattatcttcctccttttttggctaaaaactatgttataatttcctcatgtcataaaaaattttataaatacaatttttagtggctgcataatatttccatcttatgttggtaacataatttacttacccatgttcctaatggcaatcttatggttgttactatgttttttctttatcatgatgtgctgatgaacagctttaagtatatgtctttgcccagaattctggtcatttctttaagatggattccatatggggaattcccaatgctaatgttttttagattctttttttatttttattttatttatttatttttttgagacagagtctcgttcgatcgcccatgttggagtgcagtggcacgatctcaggttcaagcaattctcatgtctcagcctcccgagtagctgtgattataggcatgcgccaccacgcctggctaatttttgcattttcagtagaaacggggtttcaccatattggccaggctggtctcgaactcctggccccgagtgatccactcgccttggcctcccaaagtgctgggattacaggcgtgagccaccgcacctggccatttttaggttgttgattcacaccaccttttcactgtgtggaagggagaaccatctacttcctaccagcggcacttgctggagagttctcatcttgcttgcactctgaagcatgtgtggttattgttttttactttgcaaatttggtaagtaaaaaacagcatctcttaattgttttaatttatatttctttgtcttatagtaaagatggttagttttttaaatttatttattttttgagacagggtctcactctatcacccaggctgatgtgcagtggcatgatctctgcctattgcaacctccacctcctggggtcaagccatcctcctacctcagcctcctgagtacctcagcctcctgagtagttgggaggtgggtgccaccacacctagctaatttgtattttttgtacagatgatgtttttctatgtagcccaggctgatcttgaactcctgggctcaagtgatccaccccctcagcttcccaaagtgctgggataacaggtgtgagccaccacacctggccagtttttattttcatttttatttttatttttattttattttattttattgaggtggagtctcactttgttgcccaggctggagtgcagtggcacgatctcagctcatggcaacctctgtcttcttggttcaagcaattctcctgcctcagcctcccgagtggctgggactacaggcatatgccaccacacctggctaatttttgtatttttagtagagatggggttttactatgttggccaggctggtcttgaactcctgacctcaagtgatctacccaccacagcctcccaaagtgctgggattacaggcatgagccatcgcgcctggcttttatttttatatttttgagatagagtcttgctctgttgcccaggctggagtgcagtggcacgatctcagctcactgcaacctctgcctctccaggttcaagcaattctcatgccccagcctcccgagtagctgggactacaggcgctcagcaccatgcttggctaatttttttgttgttgtatttttagtagagacggaatttcaccatgttggccaggctggtcttgaactcctgacctcaagtgatctgcctgccttggcctcccaaagtgctagttttgcaatgttaattggtagtggcagtgtgaatgaaaggagtcctattggaggtgggcgtgtgaagctgtgtggtctacctgtaaagcatggtgccaagccccttccatcgaaacagcctgcatatcaaacactgccaatgttaattcaccatttacatttctcatttgtttaattacctattcatgaacttgtctttgggcactggatcagataggatacactcgggccaggcaccagaaaagcttcttttcgttgggattttaaaaagacagtgaagataatgtcgaacttataccctggagagagaaccatacatggaatactaggcagagatgaatggactttagaatgagacactccggagctggattcctggttttgtcacctaccatttgtgaggtcttcagtaagtctctttagtatcattttcttctacagtcacacaactaataagggccaggatgcacattctgatcttggaactctgagtgctgggctgggactaccttgtcttgtagccttattgagaagctagaaactgtgatctgtttggctccatagcccgacttgcacactaaagcagatttgcaagcccttccccttcctcacctgcttacttcataaaacccaggcctcctccacagagagactgtattggttagctcttggtgtataacaagcaactccaaagctaggtggcttaaaacaacaatcttttggctgggcatggtagttcatatctgtaaccccagcactttatgaggccgagctattagcattgcttgaggccaggagttcaagaccagcctggtcaacatggcgagacccccatctttatagaaaaatagaaaattagccaggtgtggtgctgcatgcccagctactcaggaggctgaggtgggaggctcgcttgagcctgggatgtcgaagctatagtgagctgtgatcatgccagtgcactccagcctgggtgatgggcaaaaaagaccttgtctcttaaaaaaaattattttgttcggattctatgtgtttttttttaagtctgagtcaggccagctggtctctgtggagctctctcatatctgtggtcagctagcgggacagttggcagttgttgatctagaattgcctcactcccatgcctgggagttggcaggcagccagggcaactgagttcttcatgagcctctcatgctccagcaggctagtctggggctgttcacatggtggcatcagggttagaagtacagcaagagagcaactcctgatgtgcaattttcaagcctctgcttgtgtcatatttggtaatgtcccattggcctaaccaagtcatatggctaacttacattaaaggaatggagaaatagactccacctctagatgggaaatggagaatttgtgaacatttttgtaatctccctcacaggtcttcctccaaaatagctaaagcagccccagtcaatctccaccatatcaccctattttctcttcttcataggacctatcaccatcctaagttacctatttgtacatatgcttattatcaatcctcctaccccccacacaatgtaagctccatgaatgcaggggctcactttatcttgttctcctgtgttcccagcgccacgaacagtacctggtaggcattcagtaagtgttatgttgattaactgacttgcctgacgattggtgtggaggcagaataccagggggtgagaggaatcaaatgatcaatgtaaatgcacaggaaagtgacagtcaagtatggatgactgtgaagcatggggcactcacagaggcctgacatccctctctgaggatctgggctcctttggcagctctgaccccggtgttttcttctcatcattggcttttattgacagacaggacctgctgacttgaagcattttgacccagagttcacccaggaagctgtgtccaagtccattggctgtacccctgacactgtggccagcagctctggggcctcaagtgcattcctgggattttcttatgcgccagaggatgatgacatcttggattgctagaagagaaggacctgtgaaactactgaggccagctggtattagtaaggaattaccttcagctgctaggaagagcgactcaaactaacaatggcttcaacgagaagcaggtttattttttccagcacataaaagaaaaataatgtttcggagtccaggactggcaggacaggtcatcagatactcagaggctgtatctctgccctgccaaccttgacaaatggcttccaatgttaggtttgctacaagatggttactggagctctagctgcctattttgtgtttagggaagggaaaatggaggaaaggggagaagagcaaagggcgcttttaaagagctttcccaaaagctccacccaatgacttctgcttccatctcactaaccacccacccctacctggaatggaggctgggagatgtggcttatttgctgggtacgtgactatccctaataacaaaggggttctgacactaagacattaggggagaatgttgggtaggcagccagcactcttttaccagagggcctcctggtgtttggattttgatctcaatgtgtaaaatgacagagatgtaacaagctcatagggtatcaatatctcttattgttctatgttgatgatatttgtctttgttgtgggtaatactggacatttgttattgggtctgggtgcctggtatctgaaccccttcttgtctccagagaaccccctattttatgagacttcatgggggggcaataactacctccacttaagagtacctgaaaatgctagacactgactttcccagcctccccttagctagggccaggcatggggaccagggataaacctgtgccacattttgactcagggaagggatcgggagcgctcttttgtgtggtaactgtgataacagtacccgcaaaattgagttcctggtgtagaagtgacaaggatgcaaactgtagcagttggtgctcagtggcagcaacgccatcagaccagccctgcaatgtcattcctggaagcctcaagtgttttttttttttttaagacagtcttgctctgtcgcccaggttggagtgtagtggtgctatctcagcccactgcaacctccgcctcctgggttcaagcaattctcctgcctcagcgtcctgagtaggtggaactataggcacgcgccatcacacctggctaatggtttgtattcttagcagagacagggttttgctattttggccaggctgttctcgaactcctgacctcaagtgatcctcccgcctcagcctcccaaagtgcgggtattacaggtgcgagccactgcacccgcccaagcctcaagtcttgtctagctttccaaatgatctgagaatttctgatcctttttaacacactccttttttgcttaattggccaaagttagctttagatcgcctgcttatgcttggctagttgctgtactagactcttccatgtctgttacaaattttccatccaaacaaccctgaggtaggaattattactgtcccctttttaccaatgaagatgcagagtcagagaagctgttccttgcctgaaggtcacatagctaatgagggccagagctgggacttggagccctacaagctggctccagggctctcacattgaacttttgtgctgatctgcttctcaccctggctattaggtccaggcagaatgactgccaaaatctctagtgaggagctaagtcaaaagttggctggaacaagccaagtataagaaatggggtattgaagaggagacattgaacgggatgccgctcctggtctgagcctggctgccaggttcatgccgtgctccaccgcacattggggagctcagagctggacagagctggaggctgctgcagacttgatgcctagagcttcctgtccaccatggagctccatatgttcaagattagtcttttttttttttttttttttgagactgagttttgctcttgttgcccaggctggagtgcagtggcacgatctcgactcaccgcaaccttcgcctcccaggttcaagcaactctcctgcctcagcctcctgagtagctgggattacaggaatgcgccaccaggcctggctaattttgtatttttagtagagacagggtttctccatgttggtgaggctggtctccaactcccgacctcagatgatccgcccacctcggcctcccaaagtgctgggattacaggcgtgagccaccgcacccagccaagattagtcatttctaaagataattctgatcggacagaacgtgagcggtaacacctcataaattcagaacaccctgcacttgtgggatggattgtgcttccttacttcagtggaaaagtggttcgtttcggctgggcgtgctggctcacacctgtaatcccagcactttgggaggccgaggtcaggagtttgtagaccagcccggccggtatggtgaaaccctgtccctactaaaaatacaaaaatttagctgagtgtggtggtgcatgcttgtagtcccagctactcgggaggctgagacacgagaatcacttgaacccgggaggcagaggttgcagtgagccaagatcgtgccactgcactccagcctgggcgacagagtgtgactgtcttattaataaataaataaatacgaaaagtggtttgtttttttacaaatgtgtggttcatactcctgggtggccttattagcttttttggttgggagacaagggaaggaactttcttggatcagtgtgtgctggtgattttattgccttttcctcttaattcaatcccactctttcccttcctcaagtcttgttcacccagcctcctgccccaggaatcacggggaagaagtctgggagaccacagaaaaaacaccaatgacactgagctattagagatcaaaactgggtcaggaagagttcatgttaagctttcacatgtgctaagaacgctgaaagatacacactgatttccatcttaatagtgccagataattgacaaatttgggacaagatgagggagaggtcaaaatccccctaacttcccaaagcaaaaaaacaggagtataatgatcagaaacgtaatagtagtgtcagaagcacacaatcagctgtggacggtgaaacatataatggttctatctgttctgagattgtaaaagcacaattattttcatcaggataaaaaataaaaatgaaaaactatgctgttgaatggaacatgctacaacctatgtttattgagcacattccaagttttatatgcattatctacaatcctcactataagccagcatttagaaattatgaacttcagactgggcgcagtggctcacgcctgtaatcccagcactctgggaggccaaggcaggcaattcacgaggtcaagagttcaagaccagcctagccaaaatggtgaaaccccgtttttactaagaatacaaaaattagccgggcatggtggcgggtgcctgtaatcccagctacctgagagactgaggcaggagaattgcttgaacccaggaagcgaaggttgcagtgagcggagatcatgccattgcactccagcctgggcaacagagcaagactcagtttcggcaaaaaaagaaagaaagaaagaaattattaacttcgctttacagataggatacatttgctcagagattatgaaaactgcccaaggtcacccagctggtacaagtcacagcgaggaattgaacttggtgacaactactgattctaaaagtcttactcttgcttttttggggggggaagcggggacggagttatgctcttgttgcccaggctggagtgcaatggcgcaatctcagctcactgcaacctctgcctcctgggttcgagtgattctcctgcctcagtctcccaagcagctgggattacaggcggccgccaccacacccggctaattttttgtatttttatttttattttattttttatagagacggggtttcaccatgttggtcaggctggtctcgagctcttgacctcaagtgatccacctgccttggcctcccaaagtgctgggattacaggcgtgggccactgcacccggccaaaactcttactctttctgcaatctctaacagtgggagaaatgctctgggcaggtgctgtagcaaacactgactgcatatcaggcagaaagatcccaagatttgtcccagccttcaaatgggacggcctactctctcttcagtgagaatacttcatttccattattaccctaactgcaaactgtattcacccaattctgcaccaaaatacagcatccccaagaagagaactttttttttttaagagacagagtctcactctgttgcccaggctggggtgcagtggagcgatcatggctcactgcagcccgaactcctgggttccagcgatcttcccacctcagcctcccaagtagctaagactacaggtgtgtgccaccatgcctggctaattttctttttttatttattattactattattattggagagaaaaggtgttactgttacccaggtcccagactcctggcctcaagcagtcctcccaccttggcctcccaaaatgctgggattacaggcagaagccacttcatctgaccaaagagaattctcaaatcaccctgttctccactttctttttgagacaaggtctcactgtgttgcctaggctagagtgcggcggcaccatgacggctcactgcagcctcaacctcctaggatcaatcaatcaatcctcccacctcagtctcccaagcagctgggactacaggcgcgcgccaccacgcccaggtaatttttcctatttttagtagataccgggtttcgccatgttgcctaggctggcctcaaactcctgggctaaagagatccacctgcctcggcctcccaaagtgctgggattacaggagagagccgctgcgcccggcccgtctccacttttaaaatttccagtgacagaaattgtggaaagcaacacgagttgtatgtgttttaatatcctagattcgaagacaaacataaatgtaaataaaaactgtcagagctctctgcaatcttcagtttgggtcttccaggctgctgcagcgttgttcacaaatccacacacctctaaaggcaggcacagagcgctttcctgggtagtcgggtggcctgttggtagttgcaggcttctggtttcccatcttaatggcgatggcagggcaacctgtattggtggtgcttttgcacaagcagttctttctgccgggaacgcccttccccagcctttgccttaatgaataccactctctcttcaaatctctgctcaacaggggcgcctttttgaccagcttagtcgttagactccctaatacagttcatagttttcacatttttgtagaatctattcaagttctaactccccgccatgctcgccggcgctcaagcctagtaccatggcaagcaaagatgcggagttaataaaacagaattatacggtttatcattctcaacactaaacctgcgcacccttttccgttaagtagttcctaatagtccagcacagccttccgcccggccccgccctcgcctggctccactctgctcctgcgctttgggaatcgaagctggggcgttctccaacccccccgcgctggaagccttcactattctcctccctgtgggtggagcgaagtttgggcacttgggtcctaccgttgttattagtctttactcgtaattgatactaaagaacaaaattaaatgggtttatttttggtgaaaagttaattctccttatgtttggatttgcccctcatgcaccaaatggtacagccccacatcagtcaggctgcctacccctgacgcctgcgacggagaggcgccttccgtgctgtcgtcatcacgtcggccggagctagcgctgcgtcctgggccacgcctcccggcgcaccgacgcgcctctccggttactaagcggccttggatacctggccgcgggatgctgggcggcgtcaggtgagcggtggtcgctgggcctcaggtaaagggcgccaacagtggtgggccggctggggcgttggtgcggcctgggagctggcgagggactcgccgcactcttcgaggccgctgggccggtcatagaacatccagggtcccccggggtgaagtaaactgtgggcgcggacgtagcccgggttcctggcgccccggctgggcgcccatctccacggcctcgggtggtgcaggtgtttagtcgttccgctgactatgaaagagcatgggacgaggaatcgtacagtcttaatctctcttctgtcgtggctgcgacccctcggtattcatgtgggaaaatactgatttgactggtaatgttattgaagagaaagcgagagaatggtttggcagcgttacccaaatatttgttatttttatagttttaaaggccttatactattattaaggaaatgcatttctggctaagtctgacagtacaggaacgcagacctgctactctcaccaggggctgaactaacagaacaaaaaaagatagatgtatcacggtggtgggaccatggagggggcagtttttcaactggacaaaatgatgttaaagtgcttaaagaaggataaatatgtgaaagtagccaggaaaattctaaaattaatgctaataagggagattagctctccagaaccaccagatattataacataaaggtatagcaattaaactagcatagaagatgggtgcagcagtgtgggcccgtagtcctggctacttggtaggctgaggcggcaggatcccttgagcccaggagtcagagaccagcatgggtatcaaaaggaaaccctgtctctgaaaataaataaattaatttaaaaagtttgggactcagcaggagcttacaggtagataaaatatattagaactcagaataagagcgatttatatatagggatttattatataggcgaggtggtactgtatttcaaatcagcattgaagagatgaattggggtcaggcagcttttttagcaatttagaaaataattaaaccagtcgagcgaggtggctcacacctgtaatcccagcactttgggaggccaaagcgggtggatcacttgaggtcaggagttccagaccagcctggccaacctggtgaaacaccgtctctactatggcgcgcgcctgtaatcccagctactggggaggctgaggcaggagaattgcttgaacttgggaggcggaggttgcagcgagccgagattgcaccactgcactccagcctgggtgacagagcaagactatgctttgaaaaagaaggaaaaaaaaaaggaatgaagcccattttgagcaccacaataatttccaaatggactaaaatttaaatgttaaaaaattacatcacgaattagccgggtgtgtttgggcgcctgtagtcccagccgcttgggaggctgaggcacgagaatctcttgaatctgggaggcagaggttgtggtgagccgagatcgtgccactgcactccagcttaggccacagagcagactctctcaaaaaaaaaaaaaaattacatcatgaagtactgaagtaaagcattgttgaatttatttataatcttagaatgacaaaaaactcttctaagtgtttcatgtcatccagaagccaggaaggaaaagattcatacttttaactctataaaatttaaaatctatatggcctgcaaaattcaaccaaaccaaaaaaactaccagaagccaaataaacttatgaaaatgtttgtttaatgatcaattagaaaattatgaaacccgactgggtgcagtggctcatgccagtaaaccagcactttgggaggttgaggtaggaggatcacttgaggtcaggagttcaagggcaacatagcgagaccttgcttctacaaaaaatttaaaaattagctggacactggtgcgcgcctgtagtcccagctacccatgaggttgaagtgggatgattgcttgagcctgggaggtcaaggctacagtgagttgtgattgcagcactgcactcccagcctgggtcacagagtgggacttttatctcaaataataataataagaagaagtttttaaaaagaaaaatttaaagagaaaaatgatcaagagtacctggacaagaaaatcagaagaaatacaagtggcaaaaatctatagcaagagacaactatctcactaacttcaaagtggaaattaaaacagtaatgaggggggttttttggccctttattggcaaacatgacaaagactggaaataggattgtgtggaaacagaagggtgttagtggaaatataaatgagtataactttttggagggcaatttggaaatgatttactcagccattcaatagataagaatctctacaaatatgcaaattgcagaaaaacatgttgtttaacattgatgtttttagtattgttttagaaaatatttgataaaagatgtcagccagtagatgactggttaaataaattatggtagatccataaaatgaatactgtgtagctgtttttgttgttgttgttgtttaaagacagggtcttgctgtgttctccaggctggagtgcagagtggcgtgattgtggctcactgcagccttaacctcttgggctcaagcaatcctttcacctcagcctcccgaatagctgggactacagatatgtgccaccatgccctgctaattttttttgtagagatgtggttttatcatgttatccaggctggtctggaactgctgagctcaagcgatcctcccacctcagcctctcaaagtgctggagttacaggcgtgagccactgcacccagccctgtgtagctgtttaaaagaatatggtagatccatgtgtactgacaaagaaagatgtcaaatatacaaggttaggtgaaacaggtgtttcagaataatgcatatggtaagatcctatttcataaaataaaactgtaagttaatatatgtataaaaagaatctcgagctgggtgcagtggctcacacctgtaatcccagcactttgggaggccaaggcaggtggatcatgaggtcaggagtttgagaccagcctgaccaacatggtgaaaccccgtctctactgaaaatacaaaaattagctgggcatggtgacacgtgcctgtaatcctggcaactcaggaggctgaggcaggagaatcgcttgaacccgggagatggaggttgcagtgagccaagatcacaccattgcactccaacctgggagacagagcaagactccgtctcaaaaaaaagaaaaatagaatctagaagactataccctgcgcttaacagtagttagcagtaatgaatcaggatggaaacatggtcttgggacacaagagcagggtgatggcagggcagagccataggtgtaggctgttgggaggatctgggcaagaggcagaaagcaaaagcgggtaggggagggctgggttggttttggtcttaggtttctgtgctatgcttttgcatttcactctcaacctttgagaattgtaggagtttcctagataggtttcagttgtataccctttcttgataaattagtagtagaaggcaactatttattacttttagggtctttggaatattgtttattgattttctgatcccatctttcttccataaggtaaccatggagaaagagctgcggagcaccattcttttcaatgcctacaaaaaggagatatttaccaccaacaatggctacaaatccatgcagaaaaaacttcggagtaattggaagattcagaggtgactgaccatgtatattgttttcccttctaaatgatattgtcctgctgataaagctgagaagtctttattttcttaggtaacatagattgtttaggtgggagaagctcaatttaaagattattcagaattaggtctggcgtggtggctcacacctgtaatcccagcagtttgggaggctgaggcgggcggatcacgaggtcaagagatcaagactggccggcacggtggctgacacctgtaatcccagcactttgggaggccaaggcgggtggatcatgaggtcatgggttcgagacaagcctggacaagatggtgaaaccccatcgctactaaaaattaaaaaaaaaattagcgaagtgtggtggtgggcgcctgtaatcccagctccttgggaggctgaagcagagaattgcttgaacccgggaggcagaggttgcagtgagccgagattgtgccactgcgctccagcctgggcaacagagtgagactccgtctcaaaaaaaaaaaaaaaaaaaaaagaaagatcaagaccatcctggccaacatggcgaaaccctgtctctactaaaaatacaaaaatcagctgggcatgatcgtgcgtgcctatggtcccagctgctcgggaggctgaggcaggagaatcgcttaaatccaggaggcggaggttacagtaagccgagattgcgccactgcactccagcttggtgacagagcgagactctgtctaaaaaaataaaaaaacattattcagaatgaaataaattcttattaaaacgtctcttgggcaggacgcggtggctcatgcctgtaatcccagcactttgggaggctgaagcaggcagatcactagaggtcaagagttggcgaccagcctggcctacatggcaaaacctcatctctactgaaaatacaaaaattagccagacatgatggtgcatgcctataatcccagctactaaggaggctgaggcacaagaatcccttgaacccaggaagtgaatgcctgcagtgagccgagatcatgccactgcactccagcctgggaaacagagggagactctgtcaaaaacaaaaattaaaaaaaaaatgtctttcgaaatcagcaattaggatattattaaagcagcatattattaagttgttttccaaatcacaagccaaaagattattctaattatacacatgtagctttttaagatgttagaggctttcttcatattttgactcaggtcagtactagggaaaggaaacatgagaattaaatgagaataactttgtgtatgtgcatgtttttcttaataggtgaggatatgtaatcatacaagctaatggtagggctgattgaattagtagttgcagacttccttatgctttagcatggcttgatttgaacaccttgacttactggaagtatttgaacagaggccagatgactctggggcaggcctgtagagggaattctcactttgggagagagactggaccagttacctctaaatcccttcatctctgagcctctgtggcctctgcttccaaatagttaagagactaaaataatacataaattggtttaaattatggacttcatatttgcttttaaaattgtatttccagcttaaaagatgaaatcacatctgagaagttaaatggagtgaaactgtggattacagctgggccaagggaaaaatttactgcagctgaggtaagaaatatccactaaagaaggaatatggtgaaatgattaggagtctgagctttgaaataccggatttgaatcccccttcaccacttactgtgtggccttaaggtagtcacttcatctctcttttcatcatggagttgtgatgattaactgagatactccatgtaaagtaccaaacacatagtgtgggccaattaaatattagccacacttctttttttttttttttttttttttgagacagagtctcgctctgtcgccgaggctggagtgcagtggcgcaatctcggctcactgcaacctccacctcccgggttcaagcaattctcactgcctcagcctcctgagtagctgggactacaggtgcccaccaccacgcccggctaatttttgtatttttggtgcagatggggtctcaccatattggccaggctggtctcaaactcctgaccttgtgatctgcctacctcagcctcccaaagtgctgggattacaggtgtgagccaccgagcccagccagtagccacatttctttgctatatttttgctttgaaaataggaaaattccgccaggcgcggtggctcacacctgtaatcccaacactttgggaggccgaggcaggcagatcacctgaggtcgggagttcaagaccaccctgaccaacatggagaaaccccgtctctactaaaaatacaaaattagccaggcgtggtggcgcattcctgtaatcccagctacatgagaggctgaggcaggagaatcgcttgaacctgggaggcggagcttgctgtgtgccaagatcgcgccatctcactccagcctgggcaacaagagcaaaactccatctcaaaaaaaaaaaaagaaagaaaataggaattcatttaaaataaaagtgtttattattctagttcatggaatggataaagaatgataaatgtaaggcccagaatacaaatgacaagtattggtgagaatgggaagttattggaacccttccacactgatggtgggaatgtaaaatgatgcagtcaccatgaaaaacagtatggtagttcctcaaaaatttaagcataaaattgccatatgatggctgtgtgtggtggcccacgcctgtaatcccagcactttgggaggctgagaagggtggatcacttgaggtcaggagttcgagactagcctggccaacatggtgaaacctcatctctactaaaaatacaaaaattagccgggcgtgatggtgtgcgcctgtaatcccaactacttgggaggctgaggcaggagaatcacttgaacctgggaggcggagttgcagcgagcagagatcgggccactgcactccagcgttggcaacagagtgagactctttcaaaaaaaaaaaaaaaaaaaaactgccatatgatctagcaattccacttctgggtatatgcccaaaagaatggaaaaccagatctcagagatagttgcacacctatcttcctagcagcgctattcacaatagccaaaaggtggaaatagcccaagtatccatcggcagatgagtagataagatatggtatatacatacaatggaatattattcaatcttaaataggaaggtaattctgatacatgctacacatggatgaatcttgaggacattatgccaaacgaaaataaggcagacacaaaaagacaaatactgtatgatttcacttatgcaagcatgaggtacgtagagtagtcgaattcgtagagacagaaaatagaagggtggtggttgccagggcctgggggaggtggggaatggagcgttgctgcttaataggtatagagtttcagttttgcaagatgaaaacagttctgcagattgattgcctaacagtgtgagtatatttaatactgctgaactaggccaggtgcggtggctaacacctgtaatcccagcactttgggaggctgaggtgggtggatcacttgaggctaggagtttgagaccagcttggccaacatggtgaaacctcatctctactaaaaatacaaaaattagccgggcttggtggcacatgcttgtactcccagctacttgggaagtggaggtgggagaatcgcttgaacctgggaggcggaggttgcagtgagccgagattgcgccaccgcactccagcctggcgacagagaccctgtctgaaaagaaaaaacaaacaaacaaaaaactgctgaactatatacttcagaatggttaagatggtaaatttaggaaagattaggtgtgttttttcacagtcaataaaacaaaaaacccagaacatagaaagagccattttacagagaatgggaagtacctttgtgctgagagagaatatggggaatagagaggttgaggcagggcaaggccaatgtggtccttagattgaggcaggccaaggtctcctgctgttactctgggtggtgccatggggaagaggtccactggggagcatttctagtgcactttgtttctcaatttgattgcaaagtgaccttcccccgctgggaatggcatggagagggacatgattgtttgatcaggttaattgacagaaggagtagaaattaccattgggaatgtggaggtaaccagcaactcctacccactgagaccctgagggatatgtacacacagagggcagtggcctgcagagcaacactctattgcttgttgggcttcggctccatctccccatccacctagcgaagccaatgagagagttggcctgatgtttgccagggaccaaccagcctcaggaacacaggggcatccaaagagagggtcagaacctggtgcctgggccttttcccaagtggagatgggtgccaggccaagccttagtttgggcttccaggcatggtaggctgatgcatccaagagacacaagtccttcgagaggcaaatttgatgtaactttagcctaataaaacgtcctctcccagaccagtccctgacaccataccttctctttagagttggagtgaggtgggaagaaaagggaaaaaagctgttagctttttttctaggaatcagcattcctttgtgttacagttcttccaatgggctcatgcttgtgagatcactgctttccttgtcattgctgctggcctcctagactgttacccctggagagctgtgtgatgcctttttcatgttgacttccagaaacttctgtgacaggacagacatcatatgtctgatattagatgctagtatcatgctagaaactaggctgaacagtctttccttatttccacctcaactacattgacgcattacactagctttgtggtggtattcagttacgaccaggtaaccacgtggctgagacgagtattttccaaccctaacagaccagcatccacctatattacagatgccaactttgttaccctgaattgaaatgcaaagataatctaacccaccaccattaaaaaagtaaagcaatataacttcctaactttaatgtacagaaattaaaggatgatttataaaagaatatgtgtatttcaaattgtaaatgtttatgcatatatatactagaagaatatacatatttcagtttgttaatgcttggtcatacatgcattagaacacttctttatgtttgacattttgaaataaatgtttaataagtatgtagaactccgatgaatgggataggtacatatgcagactggtggaagtgatgtattggcaattcaaatcatgagccgtgttgctgtcggtgatgtgatttttccaaaatactgactaactcttggtaaagttctatttttttttttttttcctgagacggagtcttgctctgtcacccaggctggagtgcagtggagtgatctcagctcactgcaagctccgcctcccgggttcacgccattctcctgcctcagccttccgagtaggtggtactacaggtgcccaccaccacgcccggctaattttttgtatttttagtagagatggggtttcaccgtgttagccagggtgatctcgatctcctggccttgtgatccgcccgccttggcctctggtaaagttctgttaataaaaagagtataattcttctctcagtttacatggtagttgggtacctccgaattcagtatatgttaaatcgtgcaaaaaatactttgtacagtatttacatagaatttgagctgggcgcagtagcttactcctgtaatcccaggagtttgggaggccgaggcgggtggaacaccagacgtcaggagtttgagactagcctggccaacatggtgaaaccttgtctctactgaaaatacaaaaattagccaggtgtggtggcaggctcctgtagtcacaactactcaggaggctgaggcaggagaatcacttgaacccaggaggcgaagtttgcagtgagccgagatcgagccactgcagcatgggtgacagagcaagacttcatctcaaaaaaaataaagaaattggagttagattttaggctgagcttcttttgtttgtttgctttttcttttttaaacctccgtgactatctgagaagatattcaaatgctgtggaatagttctttactgtgtgggactggtctgaatattgcaggaccttaacttccctgcccttcacccgctaaaatgtccttaaacattaatattatggcattaatattttgccatattaatattaatattatggtgatccagaatacatgctagatggtttaaatgcctccactgagagccactggcctggatcatccagtctcgattacaggaaatacctcacatttgctgccacactaacagtgtgaatgcattctaagccaatttctaaaattcaagtctgcaaaattaatctttcttcctgtttttgccataaagaaataagaaacctccagtttgtaccaaatatccattcttttgttagaagggtctcacttacgtgtatagctggaaactgggtcataattcatgtaagctccttcaacttttgcccacctgtgttattgcacaccacatccttcatgtatctttttcttaaaatgccagatggccaataggacacagtagataccaataactactatatactcattgcatttaggcaacatggacaaatcccagaaccacataatcatgaaaaccaagtcccagtagaatttcccaagcaaaagctatgttctgagaatatatattgcaaactagacctggcttgctattatcagtcatagaacatagcatatatttagggctgtctgggaagaggagtttgagaggaaatcaaaaggaaggaaaaggaagatgaatttagggagagattcagtctgttgttcagggtccaggatcatgcagttataacccatttgttttgtttttctgttgttgttccaaaaaatgtttactaaggatctgttacacacctagtaacaggtcctaggactaacgctagggatcaaagtcaaatagcacatgatctctccactcaaggaaccgatagtctaggggaaatgacacaaatggaccatctaccaataatgatcaatgttctaagttccacatttctacagaaacacagaaaagaggcattggattattgggtccagaggaaatggactttgagctgatttttattttatttatttatttatttatttatttatttatttattttgagacagagtcttgctctgtcgccaggctggagtgcattggcgcattctcggctcattgcaacctccgcctcccaggttcaactgattctcctgcctcagcctcccgagtagcggggattacaggcatctgcccccacacctggctatttgtatttttagtagacacggggtttcaccatgttggccaggctggtctcgagctcctgacctcaagtgatccacccacctcagcctcccaaactgttgggattacaggcatgagccactgcaccccgccttaattttgattttgaaataattcattttttattttgttttgtttttttgttgtgtttcgtttttgagatggaatcttgctctgttgcccaggctggaatgcagtggtgcaatctcggctcactgcaacctccaccacctgggttcaagcaattcccctccctcaaccttccaagtagctggggctacgggtgcataccaccacgcctggctaatttttgcatttttagtagagacgggggtttcaccatgttggccaagctggtctcgaactcctcacctcaagtgatccgcctaccttggcctctgaagattcatttgttttatacagtgtggggaaggcagggggagaggaaaattcagggagcatacaagagcgagagggccgtgctgtggcaaatctagtctgggcagtagtttccaaagtaggatgcatgtgatgaatcagtggggtgccaaaaggaaattatgtttattattcatattttcattacccttaaaacatttcctttttgggagttgttttgaattataaagtacatattttatatagagatacatacatattgaatgtatttatatacatgttcagatttttttctgctggagtgcttgatgaagaaagttgagaaactatttgtctggaccacccaccccagattttctcaggctagaccagcaagatcaaccctagatttttctcccttccccagctttgtgaaaatgagagagcttccaggagataagcagaaaacatgcgtttctctctatggtttggttggtcaatgaccttgaacagaattcctcccaggtgtggtatgaaatgacttcatcctgatatcctctgtgggcagtcaagagaaggcattgtctaaatcagtggttcttaactaggggtgattctatttcttcttctcctgagggaacatgtggcaatctcaagagacatttttggttgccaggggaaggtaggtacaactggcatctagtaggtggagaccaggggtgctgctgaatggagaactgagtgcttcctttagttaagtttttcacttttgacttgctctctagatagtcagctttgaaattgtcaatttactttgagtattttggagctttatgctcaaagacaagcttggagatcctacatagagagtactttttatcttatatacatttatatgtaaatgccttatagatttgaaatatgtatttttcatctagttaaggtcttattcatggtatttcgggcaaaagtctttcaagtatattcatagattgcttttttcctttgtgtagtttgaaatcctgaagaaatatcttgacactggtggagatgtctttgtgatgctaggagaaggtggagaatccagatttgacaccaatattaactttttactagaagaatatggaatcatggttaataatggtaattagtattattattttcagtagaggcagtacttttctatctattatttgatatcatagccctctaggtccagtggcataatggaaaaagccctgggctgtgtgtgcgtgttttaatgttccattctcatcagcagtctgagcctcctaggcttgggctgcttccatttataaagcgagatggattggaaccaagttccagggtgcccttcaggtcaaaattggtatgagtctataatatcgaatttatttctaacctaaaatatacctccttctctttttccctcatagatgctgtggttagaaatgtatatcacaaatatttccatcctaaagaagctctagtttccagtggagtcttgaacaggtaagcatgttgaaagcagaaatatcttggcaaggcatcgtcgctcacacctgtaatcccagcactttgggaagccaaggtggatggatcattttgaggtcaggagttccaaaccagcctggccaacatggtgaaaccccatctccctgtctaaaaatacaaaaaaaattagccaggcattgtagcaggcgcctgtaatcccagctactcgggaggctgaggcaggagaatcacttgagcccgggaagcagaggttgcattgagctgagattgcaccattgtactctggcctggctgacagagcgagacttcatctcaaaaaaaaaataaagcagaaatatccttacacataactctcatttcttctacataaatcttccctcgtctcttctcatacattcttttcactgccctttcttctttcttgcctttttgttttgtgttattataatttattttactatattactactactcattcatcaaattatttttcttcatcttttgaaacttacttcacattcaatttattttttgtttatatatatatgtattttttgagacagagtcttgctctgttgctcaggctggaatgcagtggtgggaacacagttcactgcagccttgacctcccaggcttaagcaatcctcccaccttagcctcatacttgctgtactaatgaatgcagtgtgaaattctcaaattttttttgtttactagattttaatttttcttcttcaagggaaattagccgagctgcaggaaaggctgtgcctgggatcattgatgaggaaagcagtggaaacaatgcccagtgagtgtgttttctgatgccacatgaggaagatgtatcattttggagtcttctttttcaaaatgaaaagagcttttgtttctggttacaaaaataatcagaatttgaacagttcaagaggaaaaaagtagaagctctgcactgtaagtccatgctcctccccctgaaggtagtcttaatatagtatttaggcccagcatggtggctcacgcctgtaatcctagcacttttgggaggccgaggtgggtggcccacctgaggtcaggagttagagacaagtgtaaccaacatggcaaaatcccatctctactaaaaatacaaaaattagccaggcgtggtggtgtgcacctgtagtcccagctactcgggaggctgagacaggagaactgtttgaaccccggaggcggaagttgcagtgagccaagattacgccactgcactccagcctgggcaacagagcaagactccatctcaaaaaatatatagtatggtatttagatttctaggtttttttttttccatgtataaagttataggtgagtacctcttcatttttaatgactggattaaattggatatatcccagtttatctaaccaactccctattattggacatttaagtagtttataatgtttttctttaataataccacctaatgtttgtcaagcatcgactgtgtgacaggcatgtattacctcatttaatccttacaactctggaaagttagagatgagatacagagatgtaattgcccaaatgcacatgactactctgtgtcagaacttagatgcaaacataggcagtctattctagagcctgcactcttaacttctgttccgtattgttgttatagacaattttatagccgggtgtggtagctcactcctgtaattgcagcactttgggtggccaaggcgagtggatcacctgaggtcacgagtttgaaaccagcctggctaacatggcgaaaccccgtctttactaaaaatagaaaatttagctgtgcgtggtagtgggcgcctataatcccagctactggggaggttgaggcaggagaatcacttgaacctgggaggtggaggttgcattgagctgccatcgtaccattgcactctagcctgggggacagatggagacttcgtctaaaaaaaaaaaaattatatttgtcattatagataataaagcacaaatgaacatcttttttttttttttttttgagatggagtctcactctgtcacccaggctggagtgcagtggcatgatctcagctcactgcaacctccgcctcccaggttcaagtggttctcctgcctcagcctcccatgtagctgggattacaggcatctgccaccacacccagctaatttctctatttttagtagagatggggtttcaccatgttggtcaggctggtcttgaactcctgacctcaggtgatccacctgcctcggcctcccaaagtgctgggataagtgaacatctttgtatgtacagttttgtgcacttgtggtagtatttttttttttttaattgatcattcttgggtgtttctcgcagagggggatttggcagggtcataggacaatagtggagggaaggtcagcagataaacaagtgaacaaaggtctctggttttcctaggcagaggaccctgcagccttccgcagtgtttgtgtccctgggtacttgagattagggagtggtgatgactcttaacgagcatgctgccttcaggcatctgtttgacaaagcacatcttgcaccgcccttaatccatttaaccctgagtggacacagcacatgtttcagagagcacagggttgggggtaaggtcacagatcaacaggatcccaaggcagaatttttcttagtacagaacaaaatgaaaagtctcccgtgtctacttctttctacacagacacagcaaccatccgatttctcaatcttttccccacctttcccctctttctattccacaaaaccgccattgtcatcatggcccgttctcaatgagctgttgggtacacctcccagactgggtggttgccaggcagaggggctcctcacttcccagtaggggcagccgggcagaggcgcccctcacctcctggatggggcggctggccgggcggggggctgacccccccacctccctcccggacggggcggctggccgggcggggggctgacccccccacctccctcccggacggggcggctggcctggcgggggctgacccccacctccctcccggactgggtggctgccgggcggagacgctcctcacttcccagacagggtggctgccgggcggaggggctcctcacttctcagacggggcggctgccgggcggaggggctcctcacttctcagacagggcggctgggcagagacactcctcacctcccagacggggtcgtggccgggcagaggcgctcctcacatcccagacggggcggcgtggcagaggcgctccccacatctcagacgatgggcggccgggcagagatgctccgcacttcctaaatgggatggcatcctagatgggatggcggccgggcagagacgctcctcactttccagactgggcagccaggcagaggggctcctcacatcccagatgatgggcggccaggcagagacgctcctcacttcccagacggggtggcggccgggcagaggctgcactctcggcactttgggaggccaagacaggcggctgggaggtggaggttgtagcgagccgagatcacgccactgcactccagcctgggcaccgttgagcactgagtgaacaagactccgtctgcaatcccggcacctcgggaggccgaggctgggggatcactcgcggttaggagctggagaccagcccagccaacacagcgaaaccccgtctccaccaaaaaaaatacgaaaaccagacaggcgtggcggtgcgcgcctgcaatcacaggcactcggcaggctgaggcaggaaatcaggcagggaggttgcagtgagccgagatggcagcagtatagtccagcttcggctcggcatcagagggagaccgtggaaagagagggagagggagaccgtggggagagggagagggagagggagagggagtgggagtattttttagggtaaatttctcagcattgaaatttctgggtcagaggtcttccaacagatgggttaccaaatgtaatgtgttaccagatgtctctcagggaggtggtaccacttacagtccctatgagcacacacctttttcctctcttgccagcatggagtattctagtaaacatcgtatctctttcttttaatttgcatttttttaaattattagtgcataggatgacctttaaagtctattggctgattgtatttcttctgtgaacttcatgttcattgctttttggccatttttcaattgatggtttgtcttttcgcattcatttataatacctctgtactttgaaatattttacccagtaaaaattgacattcttatgtagttaaagcatgttacaaagttttagtagtgaaaataatgtggtccgggtaccgtggctcacccctataatcccaacactttgggaggctgaggcaggcagatcacttgagctcaggagttcaagaccagcttgggcaacatggcgaaaccctgtctttacaaaaaaatacaaaaatttagccggtcgttggtggctcgcacctgtattcccagctactcaggagactgaggctggagaattgcttgagcccaggaagcagaggtggcagtgagccgagattgcgccgctgcactccagcctgggtgacagatgagactctgtctcaaaaaatatgtaaataaaatgaaattaaaaaataaaataatgtgattggctgtgtgcagtggctcacacctataatcccagcactttgggaggtcgagatgggccaatgggttgaggctaagagttcaagaccagtctgggcaacatagtgggaccctgtctctacaaaaaaaaaaaaactgaaaattagccatatgtggtggcacacacccataggcccagctactctggaggctgaggcaagaggattgcttgaacccagaaggttgaggctgcagtgagccgtgatcatgccactgtactccagcctgggtgacagagcaagactatctcaaaaaaataataaaatgtggtcatagttcagaaatagttttaaaaaaataaataatacagattaaaattagaccaaaaacatatatggagggtggggattatttgtgtatagtaaaagtggcatttcaaatattagagatggatggcataattctgggtaaacatttggagaaatagtttcattttcataccacaccccaaaatgtattctggataggctaaaatttttaatattaaaaatgaaagcatatgccggacgcggtggctcacgcctgtaatcccaacactttgggaggccgaggtgggcggatcacctgagatcaggcgttcaagaccagcctgaccaacatggtgaaaccccatctatattaaaaaaaacaacaaaattagccaaggatggtggcgggcacctgtaatctcagctactcaggaagctgagacaggagaatcacttgaacctgggaggcggaggttgcatttagccgagatcacaccattgcactccggcctgggcaacaggagcgaaactccgtctcaaaaaaaaaaaaaaaaaaaaaaaattagcctgtcgtggtggtgcatgcctgtcatcccagctactcgggaggctgaggcaggagaattgcttgaacccaggaggcagaggttgccgtgagccaaaatcgcaccactgcactccagcctgggcaacagagcaagactccgtcttgaaaaaataaaataaaattaaattaaattaaattaaattttaaaagaaagcatagaagtacttaaagaagcccaggtacgatgactcatgcctgtaatcccagcattttgggagactgaggcaggcagatcacctgaggttaagagttcaggaccagcctggccaacccccatctctactaaaaaatacaaaacttagccagacgtggtggcacaagcctgtaatcccagttactcgggaggctgaggcaggagaattgcttgaacccgggaggcggagggtgcgatgagccgagattgcatcactgcactccagcctgggcgacagagcgagacaccaacgcaaaaaaaaaaaaaaaaaccttaaaaaaaataagtgaatattttaaattcttggagtagggaagacctttcttagtagaaacaaagtcaagtcataagggggaatatgtatagcaatataattcacagagttaatatttttgactgtcaagaatcaatctaggctgggcgcagtgactcacgcctgtaattccagcactttgggaggctgaggcaggcagatcacgaggtcaggagatcaggaccatcctggataacacgatgaaaccctgtctctactaaaaacaaaacaaaacaaaattagccaggcgtggtggcgggcacctgtagtcccaactactcgggaggctgaggcaggagaatggtgtgaacccgggaggcggagcttgcagtgagccgagatcacgccaccgcaatctagcctgggcgacagagcgagactccgtctcaaaaaaaaaagaaaaaaaaaaaggaatcaatctaattatttcactttgtgtcagcttatccaactggtataggtaaaagaactgtagacttggaattagaaggaattgttagaagttcctgattccctctcttacttgccaagggtgacccaaggcatagtaactgttagtgtctgtttccctatctgtgtagtggggataatgttaaccttacaaaattgttggaaaatttcagtaaggtgatatttgtgaaagtgctttgtaaagttgaaagcctagtgccctacttgttgttgcgttatgactttgtaattaattatagtgaagggaatatgtctagttgttcctttcctggattatccaggaaacagcttcctggtagactttgaggtatggactagtcctgcttcttgctttgaggtatctttgcctgttggagtctcagattctcctttatccttatttcctgttatgtcccttctcccttctctcactctgctgtagccacactgactttgtttcaatccttaaataagtgaagcttgtattcatcttagggactttacacaagctattccgtcttttaggaaaactctttctgaaacttttcactgagctaatcttattcattcacatggtttggaaagttctgttttggggatgggtgtttaagtttatacttagtcttatcaaaatgtcagtctttttttttttttttttttttttttttggagacagagtttcgcccaggctggagtgcaatggcaccatctcatctcactgcaacctccacctcctgggttcaagcaattctcctgactcccgagtagctgggattacaggtgcccgccaccacacccggctaagttttgtattttgagtagagacagggcttcaccatgttggccaggctggtcttgaactcctaacctcaggttagtctggcctagtctcattgatttttttagtagtaataaaagaaatacaggagtgtaaataatagcaaataggccggtcacagtggctcacacctgtaatcccagcagtttgggaggctgaggcgggtggatcacctgaggtcaggagtttgagactagcctgaccaacatggtgaaaccccatctttactaaaagtacaaaaagtagccgggcgtggtggtgcacacctgtaatcccagctgctcgggaggctgaggcaggggaattgcctgaacccaggaggcagaggttgcagtaagctgagatcacgccattgcactccagcctgggtgataagagcaaaactccatctcgaaaaataataataataataataatagcagatagtttttatcttgctactcaagtgtccgttctcccttatgccttgagaatcatcttccattgattgcattttgggaaaatgtgggggatagatgtgcattgacctccatatgactatttctcccacctactttttcttcctccatggacaactgcttgttttcttctgcttctggcccagagatcatgggctgtaatccaccttgctgggatactgctggagtaagggtagaaggtggagtttggagaatgtgggccaagtaccacttctctttcatagtatgacaacaaaagtcatagggtagatgagattttactgaaggaatggggaagattaacaccagagggaggccaggcccggtggtttatgcttgtaattccagcactttcggaggtcaaggtgggcggattgcctgagctcaggagttcaagaccagcctgggcaacatggtgaaaccccgtttctacaaaaaatataaaaattagtaggtgtggtggcatgcacctgtggtcccagctactcagggcactaaggcaagagaatcgcttcagcccaggagattgaggctgcagtgagccatgttcataccactgcactccagcctgggcaacaaagtgagatcctgtcttaaaaaacaaaacaaaacaaacaaaaacactagagggaaataattttaaacttaagccaaaaagaatttttgttgtctaaagaaaaagggaaattaaaatctctatgaggaacccctcatgggtgcttcccctataccccctcccccagtttctaaccttacgccctggtgttgagatctgtgtttctctccattctgagagcacttccttcaagctttgcagagctccatctttgagtaaaaccctaacccctcctacatgggttggcttcaccccagaatctgcaccccacctttgctcctctatcccacaccctctccaggagtacattgccccaggtcagaccaattcactctagataatctaagacaagtctttgttaggacagtggagagtagaggagggactccaaagcagatctgtgtagaagtgtccattatagcgtatatttatgcctctgttcatgtgacatttaactggtaacatacccatccagtgatatacattaattcttagagatagcactagccaaacctaaggaagaagaacgtatttaccagtaagatattattatgcagagcagcttgagttcagttcttggatgaggccccatcctcttcctcctccctccatcaggggcttctttagttctcccagttacagtcacttacactttcctgttaatttactttcatgttttttaaaatgctttattaaatgtgtagctagagttgtcccagtttttaagttaacaaaccaaagcttagaaaaaattttttgtttgataatgaatcaaagagtgttactcagctgagcaccgtggcacacgcctgtaatcccagcactttgggaggccaaggtgggcagatcacttgaggccaggagttcaagaccagcctggtcaacatggtaaaaccctggctctactaaaaatacaaaaattaactgggcgtgatagcaggcactgaggctgcagaacagcttaaacctgagaggcggaggttacagtgagccaagatcgcaccactgcactgcagcctgggtgactgagtgagactgtttcaaaaaagagtgttactcaagaaacattgagattattttcagaatttttgtattcatgtttttaaaatttgaatgtgtttctttaatttcttacagggctctcacctttgtgtatccttttggtgccacattgagtgtcatgaaaccagcagtggcggttctgtctacaggttctgtctgcttcccacttaacagacccattttggctttctatcactcaaaggtacagcttttcttagatatgggtatagatgttatttttattgttgaaataataaaaaccaccttaccatttccagaaggcttctatatgttttctcactggtcttcctgccagtcctgcaaagtagcatttcagctatatacattttgcttatggggaaacagtggattgtccagtaattgatgaagttaaggcctaaacctagctcttattattctaaacccgaagcttttccactgtagcatgaggctacctgtattataactttttttttttttttgagatggagtctctgttgcccaggctggagtgcagtggtgcaatctcggctcactgcaagctccacctcccgggttcacgccattctcctgcctcagcctcccgagtagctaagactacaggcacctaccaccacgcccagctaattttttgtatttttagtagagacagggtttcaccatgttagccaggatggtctcgatctcctgaccatcctgcctcgtggtccacccgccttggcctcccgaagtgctgtattataacttttaaaataacttttttttttttttgatcccatggcagcatattgatgaaaataacttttaatcctgtctgtgactatgggctgtcaccctcagtgtaaagagaatacattcaggaacagatggagttaacatattacacaaaatagcacagaattatgttgctgttagtttatactaggaaaatatatcagaaaactatttttccagttattatcctagagaccccatagaaatgtgggcacagctagtcccaggcagtgacccaacatcccactgcctttctttttctttttttttttttttttgagatggagtctcactctgttgtgcaggctggagtacagtggcatgatcttggctcactgcaacctccgcctaccaggttcaagcaattctcctgcctcagcctcccgagtagctgggattacaggtgcctgccaccaagcatggctaatttttgtatttttgggagagatggagtttcactatgttggccaggctgatctcgaactcctgacctcaagtgattcacccaccttggcttcccaaagtgctgggattacaggcatgagctctgttgcccaggctggagtgcagtggcgcaatcttggctcactgcaatctctgcctcccgcctcagccttccaagtagctgggattacaggcctgcaccaccacaccctgctaatttttgtattttaatagagatggggatttaccatgttgcccaggctggtcttaaacttctgagctcaggcaatcccccccacctcagcctcccaaagtgctgggattataggcatgagccactgtgcccagcccccactgcgttttaattcacattttgctgaatttaccttcatctgccccctaagacagaattcaccagctgatctcctaattttttttctagggacctaggtgtctctagctctgaacaatcctatttttctttgtggtacctaggaattacctttcccttcttatttaaaagctctcgggctgggcgtggtggctcacacctgcaatcccagcactttgggaggccaaggtgggtggatcacttgaggtcaggagtccaagaccagcttggccaacgtgatgaaaccccgtctctactaaaaatacaaaaattgaccaggcgtagtggctcacgcctgtaatcccagcactttgggaggccaaggcgggtggatcacgaggtcaggagattgagaccatcctggccaacatggtgaaaccccctctctactaaaattacaaaaattagctgggcgtggtgtggtggcacgcgcctgtaatcccagctactcaggaagctgaggcacgagaatcgcttgaacccaggaggttgcagtgagccgagattgtgccactgcactccagcctggaggcagagtgagactccgtctcaaagaaaaaaaaaatattgaaaaattagccaggcacggtggcaggctttgcagcatttgcttttaacctggtacaaatcagagggttttttttaccaattttttaaaaatgtatgtaatgtgtgtatttatgtctcttgacatctctggcttagtataattcttttcctggggaagttataactatgcctgttccctgtatgtgatgtagctaaaaaaaccgatttcattttgtatttttactattgaactggttttctcattacaaaagtaataatgtgctcattgttgggctgagcgtggtggctcacaactgtaatcccagcactttgggaggtcaaggcgggcaaatcacttgaggtcaggagttcgagactagcctggccaacatagtgaaaccttgtctctactaagaatacaaaaatattagcccagcatgatggtgagtgcctgtaatcccagctactccagagactgaggcaagagaatcacttgaaccctggaagcggaggttgcagtgagccaagatcatgccactgcactccagcctgggcagtggagcaagacactgtctccaaaaaaaaaaaaaaaaagtaatattgtagaaatgttacaataattgtagaaaaaatgaacaatacagagataaagcaaaagaaaaaaaattcccccatcgcactactccaagactctaagacagcccaggttgacatattattcactttctcctacttttgctttgccttatttttatttatttgcctcgtaagctttaaagtagaatagcaatataatttatagtataggtcaggcatggtgactcatgcctataatcttagcactttgggaggttaaggaggtaggatcacttgaggccaggagtttgataccagccttggcaacatagtaagacctgtctctacgaaaaagttagctgagtgtggtgttatgctcctgtagtcctggctacttgggaggctgaggcaggaggatcacttgaacccaggagttcgaggctgcagtgagccatgattgtgccactgcactccagcctgggagacagagtgagaccctatctctaaaaatgggaaaaaaattatagtatactttttttttaaccgaatgatgtgttggaagcattttcccatgttactgaaaaccctttataatatgaaatttaactgctgaagaaggttgcatcattctgaattacttttttgtgaacatttggatttatttctaattttttgtgactataactacacaactgggcatagaattttttatgtttcagactgcttttgttgcatatgttaatagtttcagcaacaatgtgtgaaagaacttatttcactaaaattcgactagcgctgtttatatcatattttcatatttatttatctgataggaaaaagtactttgtttttatttgttaaaagttacaagtattgaaaatttttcttattaaccagtcattattttatgactctctcatgcttgtgccttagttttctggttttttttttttgagacggagtctcactctgtcgcccaggctggggtgcagtggtgcgatcttgcttcactgcaacctccgcttcccagattcaagtgattctcatgcctcagcttcctgagtagttgggattacaggcatgcaccaccatgcctgactaatttttgtatttttaatagagacggagtttggccatcttggccagcctggtctcgaactcctggcctcaagtgatccacccgcctcggcctcttaaaatgctgggattacaggcatgagccactgcgcccagccttgccttagctttctttgagactgagtcttactctgttgcccaggctggagtgcagtggcgcgatctcagctcgctgcaacctcgcctcccaggttcaagcaatcctcccgccacagcctcccaggtagctgtgggagtacaggtgcgtgccaccaaccctagctaatttttgtatttctagtagagacagggttttgcctcccatgttagctaggctggtcttgaactactgatctcagggtgatctgcccaccttggcctcccaaagtgctgggattacaggcgtgagccactgcactcagcctgctttagctttctatttggatcttacttaaatacttttttttttggtacccataggtatctttaattgtacagactgtctttgagtttatcttttttccctttaaaattatgatcttcgtttataagataaacaacaataggaaaatgctgtagaatcaatttaatttttttttttttttttaatttttagagacagggtttcccaggctggagtgcatggtgcagtcatagctcattgtaacctcgagctcctgggctcaagtgattctcctgccccagcttcccaagtagctaggactacaggtatgcctcaccacacccagctaatgtagaattaatttatgttagttttcgttaaagccaaataaaaaaatatagaagtatctaaaatgagaggcaggttaaagtgtagtagttattatagttggtctttcttttttttgttttttgagatggagtctcgctctgttgcccaggctggagtacagtggcgcgatctcagctcactgcaacctccgcctcctaagttcaagcgatttccctgcctcagcctcccgagtagctgggactacaggcgcatgccaccacacctggctgatttttttttatttttagtagagacggggtttcaccatgttggccaggctggttttgaactctcaacctcaggtgatccgcctgcctcggcctcccaaagtgctgggattacaggctgatccactgcgcctggcctatagttggtatttctaaactttaaaatctgggtgtgaattggcactcttcagtatataagacagttgctagcatgattctaataagtgtctgggtactaggatacatgagatgcactttcggatttgagtatctgaccctgctttgtcatcaatagaaccaaggtgggaagctggcagtgcttggttcatgtcacatgttcagtgatcaatatttggacaaagaagaaaacagcaaaatcatggtaagctttttcttttgtcatattaatatacaatgtgtattattttcatgtcatttaaaaaaatactggtaagtttatttgctcatttaaaagcagctactcagaacccattatatgccaggcactgagaatacaaagtcgagtcaggcatagtcccagtccctgctttggaaaagtttgtaatacactgagagagagagagacaaattagtaaacccagaagggtgtttctgagcatgtcaggtggggtgggagctgagcctggagaagcggagaggaacaggctcaatagcagtatcacgtgtaaggccaaggagcttgaacttgatgctgaaagccacagggagcccttgggttttcagcagccttgagcatagccagatctgtgtttcttctttttttgttgttgttgtttatgaaagaacttctagaatgttttggaaagattcttctgtcagttgtgtggaaagtggaaaggaggaggcagcctagagccaattaggaaggtggtggtgtcaccaggcaaggagaaatggggacctgaattacgggagtcaaggtgtgagtggagaggaggggctggtaggaatgggaattaggaaaggctctgtagaggactactcactgactgatgtggcaaataaagtaaaggcattgcaattttgtcaaaaaaatgccaagggaacatgtcttacggaagatggcagagtagggaagcacatgtctgtacagcatgtgccagagctgtccattggtgattccagtgagagaaagaaacgccttataattgttatattgggagattgataaagatcttatttctgtggaatttacatgaagtttcaatgtctctagacacattatgggagatctagatattctacttttttttttttttttttttttttgacatggagtctctgtctgtcacccaggctggagtgcaatggcaccacctcagctcactgcaaccatcgcctcacgggttcaagcgattctcctgcctcagcctcctgagtagctgggattataggtgtgcgccaccacaccaggctaatttttgtatttttagtagagatgaggtttcactatgttggccaggctggtctcgaactcctgacttcaggtgatccacctgcctcagcctcccaaagtgctgggattacagcttgagccaccactcccggcctaggtattcttcttttcaaaagttttaatttcagactgtcatcacagtaaatagggattaattcaggattgtgaacaaaggttaataaattttagcttgtggttagaggttagggtgcttaaagatacattataaatttctgataataaaagttgcattatgctggtcatggcagctcatgcctgtaatcctactactttgggaggccgagacaggtggatcacctgcgatcaagaattcgaggccagcctgaccaacatggtgaaaccccatctactaaaaatacaaaaatcaaccaggcctggtggcaggcacctgtaatcccagctcctcaggaggctgagacaggagaatcgcttgaacccaggaggtggaggttgcagtgagccaagattgcgccaccgcactctaaccagggcgacggagcgagactctgtctcaaaaataaaaggtgcattagggtgaagaaaacctttgagttctcatatgattgcatcaagacaaggctggctacccttttctgaatcactggtttaatctttcttcctttatcattcttcttgatttaattctctagtcctgaccttcagctttttcaaataaccaactgtcctaattatatacttttttttttaatttaggatgttgttttccagtggctcacgacaggagacatccacctaaaccagattgatgctgaggacccagaggtagacaccgaattattagaaacttttaaatgaaaaatgagtccagcttctcagtaccacttctcacagctcaaaaggaatacatgactgtcttaactcatctgtaagacagatggaacgaaggaatgatttgggggagatgaaggccatattgtaaaaaataagtcaataaacaatatatgtaattaatcatagaattaattggagggggagcatacatacatacagtatgtatataaattagaatttaaattatgggcactctggcccagactttcaaaatgagcatctgcagaaaaatacttttttcagaaatctgaaattttctcataaagaaacaaagagtatcagaatttatgttgtaaactataattttgttgcctttagatttaacagttctaaaggcattataataatattcatcagacaagggaaagtggtgaaaccagcacagtgaaatcaccaccggctcttggaccttatacaggttctttctgaccatttttcatcctagttttctttattaaaaaaattttttattgtatttattttttgagatggagtctcgctctgtcgcccaaggctgtagtgtagtggcacaatctcagctcactgcaacctctgtctcctgggtccaagcgatccttctgcctcagcctcctgagtagctgggattacagatgtgaaccaccatgcctggctaatttttgtatttttagtagaggcagggtttcaccattttggctaggctggtctcaaactcctgacctcaagtgatccacctgtctcagcttcccaaagttctgggattacaggcgtgagccactgggcccagccttctagttttcttatctgtgaacagggaacactaatacccgtgttctctgcctcacaggatggttgtgtgggctaagttaatagatggtaatgtgtcaggcattgtatgccatatacttccacataagtcatcttatttaatcctcataactgccctgggaggcacatggtcttattctcattttatagatgaggaaactgaaatccttcaagattgcagtgtgttcaaatggcaggcaagtgcagagccaggatccaaatccaggtctcctaattcaaactgcacttactctacaattgtttctctatttcttaaactctgaaatgtcaggaaaatgatttcctggccattggtcataggaggtaggtgagaagacagtcgaagatggctgtccactgactgcttcctccctcactagggacatggcttctcagagactgatttgggttaggaaacaggagagctgcatgtctaaaatatttccttatgtggaaacattaagcatgtggatattttgcttcattatttaagtgtaatatatttaaccactctcggccgggcgcggtggctcacgcctgtaatcccagcactttgggaggccgaggcgggcggatcacgaggtcaggagatggagaccatcctggctcacacagtgaaaccccatttctactaaaaatacaaaaaaaaaaattagccgggcatggtggcaggcacctgtagtcccagctactcgggaggctgaggcgggagaatggcatgaacgcaggaggcagagcttgcagtgagccaagagcatgccactgcactccagcctgggcgacagagcgagactcgtctcaaaaaaaataaattttttatacatatatatattctatatttatatttatatatattttatatgtaaatataaatatatacatattttatgtaaatataaatatatacatatttttatgtaaatataaatatatacatatttttatgtaaatataaatatatacaaattgtgtgtaaatataaatatatacatatttttatatgtaaatataaatatatacatatttttatgtgtaaatataaatatatacatatatttaaccactctcctgttggcaggcatttatgttttcctggtcttttactagtccacagcatgtgtcatgactgagggctctcagcaatgctggagggatgtccttggctaggggagaaggactgggatctagtgtagcagtggaggaactgtctgtactggtgtcacaggtgctctggcatgtatcaggaggaaagaagcagatagggcctggatgctagggggtgggcacatgttatggtgggagcttgtggactttctttcatgatttcctctattttcttactaaaatagaaaataaggtcattgctaaaatggtgaaagggaaaaccaatttttttgttttgagacaaagtcttactgtgtcacccaggctggtgtgcagtggtttgatcacggctcactgcagtgttgacctcctggactcaggtgatcctcccacctcagcctcctaaatagctgagactacaggcacacaccaccatgctcagctaaatttttttgtatttctgtagtgacagggttttgccatattgcccaggctgatctccaactcctgggctcaagcgatccactcacctcagcctcccaaagtgttgtaggtgtgagccactgcacccagctgggaaaatcattttgatggctgaactgacaaaagggaattattgtctagaagaatgggaaagtgagtagactacggagatgtagttgattgctgagcgctcaagatcagagatcatgaaattaaaagaccagttgatagggttgtatgtttctccagctgttttcagccatgtgagtactggtgtaattggagatttggatttagccagtactggggtttagccaagtgagttttgttcctctttgcacataaattggcttatttaaggtttagtgtcagtgatcatgaacagtaaaatttcttggcaagagaatataaatgttgcagatttagacctgagacagtggagacttgacagaataaatgcttgctcttgctgtgctaaaaggaaccctcttgtggctttcagatttctgactacatgatgctgccctacacagccaccctatcaaagcggaatcgagagtgtctccaggagagtgatgagatcccaagggactttaccaccctcttcgacctgtccatcttccagctggataccacctccttccacagcgtcatcgagtcagtacctgtgggcctctgagccacactgcactccattctgagtgtttggtttggaaacatgaacctgggaacgggaattagggtcacagtaaatgtggcatgcagaacatgttctcagatctatgatgaggtcaacaaagaaactgggctgggcatgaggggttgatgtagaggaactgccagaggttattagcccctgcgtgttccagattctggaccaggcatttagcctgaccagcttgtttcattttgccccagacttctggttttagcacagagagtcccaagtcccaggaaaatggagtcccaagtccctcagtaaatggagatggtggtcacctcatttctctctgggtatctgggcaactggtaatgctattaactggcacttagaatgcaggaaaaggaatgataaatgggctgtgttctgggcactctcagtctagtgcggatgtgcaggtggaactacaagtttaaagatgaaaagatctgtaaagccgttagggaagccgtgggatgggatgaggacatcagggacagcacaagaatgggaattggccttgagacaggacctcacagctgtcagtgcttgagaggcaggagaagaagagggccaaagacagaagctggggaaaagcagttaaaagtacaggacagcgggcagcatcctgaaggcaaaggaggaggaaatgacacagaagcagaggggttcagaaagggccagggctcatcttcactgtttctaacctgaattttgctcagggagaaaattgtttagcttgtcttcctttctcacccccgtgtatccggagagcaagagccatgtcttatcaacctggaatcctcattgcctaagacccagagcccagcacatcctgggcatttgggggatgtttgtgaaattagcatgctgccattctccttgtgccttgcttatacatccactcagcaagtatttgtggcacaactacttttccaggatcttgggatgcttcagggacctcaataatgaaaatctttgcccttttgaagtttattatctagcaaaacagacaggcatcaagacatttctatatgtgtgatgtaaattaaagaatatgttagaagatgattacatacgtcaagcagagtactggggtaggggagtgccaggcacattgcattttaaatagggtgttcaggccaggcgtggtggctcacacctgtaatcctagcactttgggaggccaagatgggaagatcgcgaggtcaggcgttcgagaccagcctggccaacatggcgaaaccccgtctctactaaaaatacaaaaattagctgggcacgatggtgggcacctgtaatcccagctactcaaaggctgaggcaggagaatcgtttgaacccagaaggcagagatggcggtgagtcaagatcataccattgcactccagcctgggtgacgggaagactccatctcaaaaaaaaaaatagggtgatcaggatggcttcattgaaaaggttagatatttgaggaaaaacctgaaggaggtaaagaatttagccttgtggctatctgagggaagagtattctgggcagaggaaacagccagtcctaagactgcaagacggaggaatgcctgatacattcaaggaagagcaacaaggccatcgtggccactgcagagtgagtaggggtgagaatggtgggagatcaggcctggcctacttttttgcctctgtaaggacttccttggctttcactctgggtgaaaagaggagccactgagagttctgagcagaggtatggcataatgacttccttatatcccgaacgtcaaggagcaagaatggaggtagggcctgaagggagcggtcacagtaactcaggcatgagttacttgggaggctgaggtgggaggattgcttgggccccaaaggttaaggctgcagtgacccgctccagcctggtcaacagagagagatcttgtctccggaaaaaaaaaaaaaaaaaaaaagttgcaataactgagttgagaaagactgcgagtagattttgcaggaagagcagaagttcagtttgaggtatatggagttgagatgtcaattaggtatccagatgatgtttagtagcagttttatattttaacctggtggtcagaagagatctctgagctgcacatttaatttgggagtttgggggcacatctgtacttcatctaaagcatacatcttttcctttttttttttttttggagacagaatttcactgtttttgcccaagctggagtgcagtggcgcaatctctgctcactgcgacctctgcctcccaggctcaagcaattctcctgcctgagcctcctgagtagcaccaccatgcccagctatttttgtatttttagtagagtcggggtttcaccatgttggccaggctggtctcgaactcctaacctcaggtgatccacctacctcggcctcccaaagtgctgggattaaaggcatgagccacagcacctggacctattttcaaatctataaaatcaggatgaatcttttttcttattttttgcctttttttctttcttttcctttttttctgtttttcaggatgaatcttaacaatagatgatgtatgagtttaattagcattttttttctttcaatggaccataaattatgatgcatcttacctttggtggattcttagatttgatgaaatatggtagatagtatgtaaagccatgtgactggatgagctcacaaagtgttaaaagtgttgatagagaagaaaaaaggaccatctattgagccctggggcaccccagagtttagaatttaggaagaaacagaaaatccagctgggcacggtgactcaacgcctgtaatcccagcactttgggaggccgaggtgggtggatcacttgaggccaggagtttgagaccagcctggccaacatggtgaaaccccatctctactaaaaatagaaaaaaagtagctaggcatggtggcacacgcctgtagtcccagctactcgggagggtaaggcaggagagtcacttgaacccgggtggcagaagttgcagtgagccaagaacacaccactggactccagcctgggcaacagagcaagactccatctcagaaaaaaaaaaaaagaaaggaagaaatagaaaagccaaaagaagagatggaaaagcgccagcgagtgtgagatgaagaaaatcaagtgcatggtattctgagagccaagcaaagaaagtctgtcaagatggaaagggtaatcagcagtgtcagatacttctgatgggtcataaaaaatgagggttgagaatttatcattggatttagcaacatggaggtaactggtgatctagacagggtcttctttatgacatggtgagggtgaaagctcatttgaaattggtttaagagagaattggacatagcaaacatagatagctcttttatggtatttgctacagagaggaacagagcaggggcaagggccagggtcagtaactagctggaggaagtaaggtcaagaaggtgttttttggatggaagaagtcacaggatatttttatactggtgggaatgttccagtagagagaaaaatggataatgtaggagagagcgaggaaaatggctggcgtgaaacacaagagtaagcaagagacaatgggaaagggggtttggtaagttgtcttagctctttttctttttttttgaagacaggtttcactcttgcccaggctggtctggaactcctgggctcaagcagtcctcccacgttggcctcccaaagtgttggattatagatgtgagccaccattcccagcctggccttcgcttttatttttattatgtcatatatatatagagagagagagagagagtttttttttttttttttttttttgagatacagtctcactctttacccaggctggagtgcagaggcacgatctcggctcactgcagcctccgcctctcaggttcaagtgatcctcctacctctcagcctccatagtagctgggactacaggcgtgcaccaccacacctggctaattgttgtatttttagtagagacggggtttcaccatattggtcaggctggtctcaaactcctgacttcaagtgatccacccgcctcagcctcccaaagtgttgagattacaggcatgagccaccacgcccagcccagtcttagcttttagacagaatcatggatcattcagttggtaccctgactggggctgctgcctttctttcagagatgccctgctcagaggggaggaatctagagaggcagtctggctacagtggttttgtggcgctgcagttggctccacccagttcagacttcccagcagctttgtttacgctgtaaagggaaaatcgcctactcaagcacagatgggaaacatgggtgcagactctggtggatgagaaaagttgttgattgaagattgtggaagttctcagggcttcagtccttttgatgaaataggaaacaagatcatcagttaaaaattaccaaagaagccggacatgatggctcacgcctgtaatcccagcactttgggaggccgaagcgagcggatcacgaggtcaggagtttgagaccagcctggccagtatggtgaaaccctgtctctactaaaaacacaaaaatcagccgagcttggtggtgcgcgcctgtagtcccagctactcgggaggctgaggcagaagaatctcttgaacctgggaagcagaggttgcagtgagccgagatcgcgccactgcattccagcctgggcgacaggcagagcgagactccatctcaaaaaaaaaaaattgccaaagagatagtggagatttaggagagaaggcatatattaggcctctaggggagtgggagagggagtagacaaggtttctgtagaaggatttgccagtcccacgggaggttagaggttttggatctaactacaaaccagtagagtggtatgttttcctccaaacttgtttagctgtgtagctgccggcagagtgggcccagacatggatttaactattgtgattttgtcaagcaagtagtataaagaggaaggggcaatatcttttgtaaatgcccaggaattacttagttgcatgttttagtataaacagtaactgctataattgtggttttaattagcttattttgtaaaaccttatacatcatatccaaaagctctgttgtacgtttttgtttttttgttttgttttttatttttttgagatggagtcttgctctgtcacccaggctggagtgcagtggcgccatctcgactcactgcaagctccgcctcccgggttcacgccattcgtcggcctcagcctccccagtagctgggacaacaggcgcctgccaccacatccagctaatgttttgtatttttagtagagacagggtttcactgtgttagccaggatggtctcgatctcctgacctcgttatctgcccgcctcggcctcccaaagtgctgggattacaggcgtcagccaccgagcccggccccaacttaagttttacagacattgaacccccactttctgccaagagcctgcaaatactaccacatttactgtttacaacaattctgaaaagtagagaatagctccatagttaacttctaagaagctgaggcttgggacaatttgctctaagttaaacagctactaatcaagccctgactaacaattgtctttagctcccctctcatctccccttccttcaatattaataacaactaacatttatgtactttgcattatcatgtaacaaccacagtgaggctgttatctccattttacatctgaggacgctgaggcacagagaaattaagtgatttgcttgaaatcacacaactagttttcattgggacctgaatttgaagccaggcaattttaactctgaatcttggaagaaattatctgaaaatgtgttactgtaggaggtgagggtgcttttaagaaacagcaggaccaaagccttcagagctaccagggcgtgacatctgcatcaccccttccacaggtaacagcctggtcacaaatcctgtagctcctggctgcatgtttggctcttaacttgcttggttttgagctctggtgttctcttcctcctctgcagctcagggcttttcttagaataaaaaaagatacatctgaccactccgctagccagttgcagtctgaccagcttctgctgttttggcctaattctcccctgatatgtttaaaccagatcattatgataattcttcagtgttaaatgaaggattaattggaactgcctactgtcttagtgtcagcagagtcaaatagtggatgtttcagagacttagacaactcttgtatttgtcttacataccacagcagaggccagtagttactggcttctggtgtctatatggtaagctcagatattttcatttgctagtaacatctttcaatagtttatcttttctgagttaaaattcagttaggctttaaatatttatgtcaactacagggtgttgctctgaagtaatttcatttgtccattgggtgtttatcaatgcctgtggagtatgaggtagaggcagatggtgtggagtccctgcccttagagttcatggtctgatgggctggggcttgaaacatggagtggtgaaaacgcagtgccagaggtcaggccattcccgaaagatctagttcagcgccatttcacagatttatatttagcttttgcatctgttcttcccttggttttaagatgagtttctccagtcccttacccggttcccatcaagccatgttggctaatggtaggaggataattagggcaggtggtgagcagagtggaggaagggaagacttaatgggacaaagcctttgctccagcacagtcagctctctctggggacagaaagcggaaataaattcacagctgggatagctgaggctaggactcagcagcaggattctttgtgagcaggtagtaagaattttagtttaaaactgcccctaatcacttttgattttggggcagaccaaagtaaagattctggttggcagagattggctacgtctgagttctgatcttgcctttgtcccatcttaaccatatgatttggggaagctactgtttatcattcctgtacctcagtttcttctataagagattatccgactttccacagttgtattgaggattaaataagtttaagtgcctaacacagggttggcataatacatggcatatagcaggtgcttgataaaagttatttctcttccctctgtggagatctgctgctcagtgctaggaaagattctccccaagcacctggaaatagtggaggaggtgacagcagtgagctcatttaatcgtctttctgcagtcacagacctcactcatagaaaaaagctgccatgatctttgtccactcattggcatttggttttctagcttaactttgaagggctacaaatatatgtacaatttaaactggatgacaatattttactttgcctcttccccagaaaagtttagccagcttaaaaaattgcatacaatgcaaaaggataacatgaatgtttgagagaatgaaggcaaaggagaagccacaatagaaaaataatgcaggggtaagatgagctcagctctgtaggctcgctcctaacactgatcctctgctggagtcactctggctggcctgctattctgtgaaaatgccgggcacccttctgcctgttcttgctcttgcctctgccagggacacttttgaagataactgcgtgacttcccgcctccctcactcagggctcttctgacaagccacactccctgcctctgccccttccctgtctctttctcctctgatttgtcttttttttttttttttttaagacagagtttcgctcttgttgcccaggctggagtgcaacggcacgatctccgctcaccacaacctccgcctcctgggttcaagcaattctcctgcctcagcctcccgagtagctgggattacaggcatgcaccaccatacctggctaattttgtatttttagtagagacggggtttctccatgttagtcagactggtcttgaactcccaaccccaggtgatccgcctgcctcggcatcccaaagtgctgggattacaggcgtgagccactgcgcccagcctatttgtcttcttaatatttatcagttcctgacatcttttttttttctttttctgagacagagtcttgctctgtctcccaggctagagtgcagtggtgcagtctcggttcactgcaacctccgcctcccgggttcaagcaattctcctgcctcatcctcctgagtagctgggattacaggcacgcgccaccacgcccagctaatttttgtatttttaatagagacggggtttcaccatgttggccaggctggcctccaactcctgacctcaggtgatccacccacctcagcctcccaaagtgctgggattacaggcatgagcccctgcactcggccagttcctgacatcttactagtttttttgtttagtgtgtgcctcccctccccctacaatgtaagttccgtgatggcctgccttggcatcttcttttactgttgctgtactcctcatgtgtagaactgcctggtacatagtggatattcagtaattatttgttgagtgagcacgcagaagtgcatatcatacagatctgtttacttgccagaaacagatttcagatttgactcctatctcttaatggtgaaaagaaataaaaaaaacacaggagttgcaagattcactgtgtccatcaggcaaaacaaaaagcttatttaggagaaacctgatatgaaacttgaaagaaatgtttcttttcagttctcaatgagtaataatgtatgatacggtagagaagattcctgaaaggatcattacattatttataacaacacattttgtctctttttaatttggactttattgtattcatagctttaactttttaaaagtcaaaattggccgggcttggtggctcacgcctgtcaatcccagcactttgggaggctgaggtgggtggatcacctgaggttgggagttcgagaccagcctgaccaacatagagaacccccgtctctactaaaaatacaaaattagccgggcatggtggcgcatgcctgtaatcccagctactcgggaggctgaggcaggagaattgcttgaacccggaaggcggaggttgcggtgagccgagatcatgccattgtcctccagcctgggccacaagagcgaaactccgtctcaaaaaaaaaaggtcaaaattatttatctttcaaatcatgtattaactattatttgtaatccactatgattaagacagaatttggggctgggcacagtggctcacacctgtaatcccagcactttggaaggctgaggcgggtggatcacgaggtcaggagttcgagaccagcctgtccaacatggtgaaaccccatctctactaaaaatacaaaaatttgctaggcatggtggcacgcgtttgtagtcctagctactcgggaggttgaggcaggagcatcgcttgaacccgggaggcagaggttgcagtgagctgagattgcaccactgcactccagcctgggcgacagagtgagactctgtctcaaaaaaataaataaataaaagagaatttggctgccttaggtgagcagttaataccaatcaaaagaaaatttaagattgaagtagctgtaaagaatgatgaagaccctcattcccaggaaatcaatttccatctttggacaaatctcaataccagaaactgatttaaaaagaaaaggttgggtgcggtggctcatgcatgtaatcccatcactttgggaagctgaaacaggaggacctcttgaggccaggggttcgagaccagcctgggcaacatagtgagcccttgtccctactaaaatttttttttaaaaattagcaaggcatggtggtgcacactcgctcgtagtcctggctactcaggaggctgaggtaggatgattgctagctagagtccaggagttcaggattaaaatgagctatgatcataccactgcactccagcctgggtgacagagtcaaaatttatctcaaagtaagtgtttagattgtggtttttgtgcataaatgaaaaaaaaaaatagaagaagaagaaaaaagataaagcacataatactttaaacatattgatgcatatgagtgatatgggaagaataaattcaaatttcaaagttggaattaatataggtattattattttggaaggggaaatctcaaacctttacactaaatcaaagaaaaaaattcagaatttcaaccagtcaccaaagaaagtgaaacactgcatatctacatgagtatctgaaacagacagaaactagactaacttccatgaaattaaattccattaaaatatttcattgaaatccccttgaaatacgttaacatattctgatctaaaatgaaaaaagatttaactatgtaatctatgtaagttagaatgcatattctatttagagagttgattaagtaacattgatattattttatgaggtgttttttttttttaacttttaagttcaggggtacaagtacagatttgttacctaggtaaacttgtgtcatgggggtttgttgtacagattatttcatcacgcatgtgttaagcctagtatccattagttatttttcccgatcctctccctcctcccaacctccaaccttctataggccccagtgtgtattctcccctatgtgtctgtgtgctctcatcatttagctcccacttataaggacatgtagtaggctgggtgcggtggctcatgcctgtaatctcagcactttgggagactgaggcgggtggatcacgaggtcaggagttcaagaccagcctgaccaacatggtgaaacccatctctactaaaaatacaaaaattagctgggtgtggtggcgcgtgcctgtaatcccagctacttgggaggcttaggcaggagaatcacttgaacctggcaggcagaggttgcagtgagccgagatcgcgccactgcactccagactaggtgacagagcaagactctgtctccaaaaaaaagagagagagagaaaaaaaaaaaaaggacatgtggtatttggttttctcttcctgtattagtttgctaaggataatggcctctagcgccatccaagtccttggcaaaggacatgatctcattctttttttttgagacagaatttttgctctcttgcccaggctggagtgcaatcgcacgatctctgctcactgtaacctccgcctctttggttcaagcgattttcctgcctcagcctcagcctcctgagtagctgggattataggcgccagccaccacacccggctaatttttgtatttttagtggagacaaggtttcactatgttggccaggctggtttcgaactcttgacctcaggtgatccacccacctcggcctcccaaagtgctaagattataggggtgagccactgcgcccagccaatctcattcttttttatggctgcgtagtattcatggtatgtaccacattttctttatccagtctatcattgatgggcatttgggttgattccatgtctttgctattgtgaatagtgctgcagtgaacatatgcatgcatgtgtctttataatagaatgatttatattcctttgggtgtatacccagtaatgggattgctgggtccagtggtatttctaaaaatagtactgaaccactgtatttcatggagaacaacacagtgtggtcagttagacgtgctgagctatagtgtcttgatccctgcttttttgtttgattatgaacacagggctcacgagcagctaaatgtgaaacatgaaccactccagctcatccagcctcagtttgagacgccgctgccaacccttcagcctgcggtgagtaggtgtgcttgggagatcccactgcagagccccactgttgcccttatcttgtcagcaggcattcgctgtggtcccttccatgtgccatttgtggcactccttgtggagtcatagtgctctgtctctaaacatgcatggacaccaaatttgttaatgttctatagagacttccatgtggtatgcttccaaattgaggaatcaaggatgtggagccttctggctattaaacatttcctattctcatcttgtggggttggagggcatatatgagatttcttggataaaaaggaagaaaactttgtactgccattccaggtgtcagggcctgattcataacataattctcacagcccaggggatagttatggtcatgtgtgtaaataggttatttttcaacatttcagtccaacattcaacttgcctttaaaattaccttgtctcaccacattctgaaatgttatgagccagttagcttgatcttgcttggtagcttgaaattggccatggtgagaggatttacattacagaaaatggtaaatgctacaaaacaggccttcagttttgttttgttttgaaagtagttaaacatttacccgcataccattggttcatacctacaaaatgtgactccaggttcaatactttctacactaatctgcatctggttctccaaataacttccatccctaaaaacttatgattaaatgagaaacaagttgtacaatcaaatgttcaacacaaacctaagccccaagctttgtgtcatcgttctgagttaattagcattggtatgtcagcttggtcagtttagtggtaattagagctggttctacttggttgtttacagtgggctaataatctttcttggtatgggtctaatgggtgagggtagacgaggtgatgggagtttgggtatttcatcctcagggaagagccgagttactgttctgtaggggtttccatgtggtgtggttcccaactgaggaattaaggatgtgaacttccttattctccttgtgtcttatcactgttagttatgattttggacaagctctttcttgagagactttatttcctttaccttatcctccctcatttctaaataatgactttatttccttttaggtttttcctcccagtttccgggagttaccacctcctcctctggagctatttgatttagatgaaacgttctcctctgagaaggcacggctggctcagattaccaataagtgtaagtttggcgaactttttttttttgagacagagtttcactcttgttgcccaggctggagtgcaatggtgcgatctcggctcactgcaacctctgtctcccaggttcaagcgattctcctgtctcagcctcccgagtagctgggattacaggcatgcgccaccacgcccagctaatttttgtatttttagtagagacggggtttcatcatattggtcaggctggtctcaaactcctgacctcaggcgatcagcccgcctcggcctcccagagtgctgggattacaggcgtgagccaccatgcctggcctaagtttggccaacttttaaactttgttttctcttatgagttttatttaatcatgaatttctgagaattgctatgagagactgcttagagtttgtttagggaaaacaaaatatgaataggagtataaacttaccattcttatttatgtcatgtaaataatgttggttgttcttctcgaggctatttagttcagtgaattagaacatagtgccaagcagaaagccaaaggtctcagctttgatccctgtgagtccttagttctgacctattgagagaccatagaattaatcttgaccctggctgccacttagcaaatctcagtcagtggtcataggagcagctaaataaggaaattgagtaaggcccaaagaatgatagagacttcaaattggacaggatctgagagagagccaagtgtgcccaccttgacatgtggatgaagaaatgaggccccaggccacacagctccacggtgagtggtcctcctgacttttggtctggggctgctcctgacatgaattgcctccaacacagcaaatgggtctgcacatatatgctcagaggcataaaattaaccatccactttgaggcagtgaccccactcctggaactctaatctaaggagattatattttttttttttttgagacaaagtttcactcttgtcgcccagccttgggtgcaatagtgctatctcagctcgaggtaacctccgcctcctgagttcaagcgattctcctgcctcagcctcccaagtagctgggattacagttgcccaccgccacgcatggctaatttttgtgtttttagtagagatggggttttaccatgttggccaagctggtctaaaactccagacctcaggtgatccacccgcctcagcctcccaaagtgctgggattacaggcatgagccaccacgtccggccaacttctacactatttatttttaaaatacaataaactcgggaggctgaggtaggaggatcgcttgaacttaggaatttaagaccagtctgggcaacatagcaagaccctgtctctaaaaatatattttaaaaaaataacaatttttaaaaatagaaaaaaactataaatttgggaatagctttaatgtccactagcagagtaatggtcttaaaatgcgtcacattcatttggtaggagaatatgtagtcattataaaagaggttcacaaaggctagggaatgacacatatgacacagacagaatttaagagagaatcctgaatgaagaaagcaagatataaaactgcatgtacaagaggataccagctatgtcagtaacatctgtatgtgcccaaagcccagaaagaagtaagcaaaatggaaacagttcagtgtaaacgaagacctttactgcatctctcttctgtggcaggcattgctgtgggtcctgggcagtcaaaaatgagcaggacatagtgatgagtccaggaggaatcacagaacggtgaagaagcagctttgacttggcatttctgtttctagcaactgtcctatggaaatccttgtagaaatgcaagacaaaaaagatatagatattaattatagcattcaaaaaattggaaacagtctaatggtccatccatcattagggggattggttaaaaagagtatgaaataagcctgggtcacatagaccccatctctacaaaaaaaaaaaaaaaaattgcctgagcacggtggatcatgcctataatctgaacacttcaaaaagccaaggcaggaggatcagttgaggctgggatttcaagaccagcttggacaacataatgagaccttgtctcaaaaaaacaaaaaaaaaggctgggtgcagtggctcacgcctgtaatcccggcacattgggaggccaaggtgggcagatcacctgaggttgggagttcaagaccagcctgaccaacatggagaaaccccttctctactaaaaatacaaaattagctgggtgtggtggcgcatgcctgtaatcccagctactggggaggctgaggcaggagaatcgcttgaacccaggagttggaagttgcggtgagccgagatcgtgtcattgcactccagcctgggcaacaagagcgaaactccatctaaaaaaaaaaatttttttaagtagccaggtgcggtgacgcatttctatattcctagctacttggaaggctgaggtgggaggatcacttgggcccaagagttggaggctgcagtgagctatgatacaccttgcactccagcctgggtgacaaaggaccctgtttctgaaaaataaataaatagaaacaaaatagaatattacatacctgttaaaagaaaaatgtagcctgggtgcgatggctcacacctataatcccagcactttaggaggctgaggcaagaggatcacttgagaccagcctgggcaacactgtgagacctcttctctatagaagaataaacaaaattagccgggcatggtggctcactcctgtagtaccagctactcaggaggcccaggtgggaggattgcttgagcctaggaagtcaaggctgcagtgagctaagattgtgccactgtcctctaacctggttgacagagcgagaccctgtctcagaaaagaaaaggccaggcgcagtggctcatgcctgtaatcccagcactttgggaggccgaggcaggtggatcacaaggtcaggagtttgagaccagcctggccaagatggtaaaaccctgtctctactaaaaataaaaataaaaaattagccaggcatggtggcaggtgcctgtaatcccagctgcttgggaggctgaggcaggagaattgcttgaattcgggaggtggaggttgcagtaagccaagatcacgccactgtactccagtctgggtgacagagtgggactccatctgaaaaaacaaaaaagaaaataaaaaaaatgcagggcataaactttgattcggaatgtccataatacatcattaaatgatgaagtcaacttagaaaactattctagtttgatcccatttttgtgaaaacttacatttacacacagaagcatacatagcaataataattctaggtagttggtggcagtagaactaggatgaaacattgatacagctgtgggtttgaatgtcttagtaaaaaacatacatttctatcaaaacttaaaatgcaaatcagagggagaataaattaattacagctgggctcagtggctcatgcctataagcccagcactttgggaggccaaagcaggtggattgctggagctcacgagttcgagaccagcttgggcgacatggtgaaaccccgtctcaaatacaaaaaatcagccaggcgtggtggtacacacctgtagtccaagctacttgggaggctgaggtgggaggatggtttgagcccaggaggcagaagttgcagtgagctgaaatcatgccactgcactccagcctgggtgatagagccaaaccttgtctcaaaaaaaaaaaaaaaaaaaaaaaaggaagaaagaaattacagtataatgtgagaagggcagtaatggctgtctatcctacatgtagggctccagaggatggcttcacagagctatgttgttggtggaattatgggtgatttttttctttaattttctttctataatattgtttgttttttggggttttgttttgttttgttttgttttgagacctaattttgctcttgttgcccaggctggagtgcagtggcacgatcttggctcaccacagcctcagctcactgcaacctctgcctcccgggttcaagcgattctcctgcctcagccttcctgagtagctgggattataggcatgcaccaccacgcccggctaattttgtatttttagtagagatagggtttctccatgttggtcaggctggtctcgaactcccggcctcagatgatccacctgcctcagcctcccaaagtgctgggattacagatgtgagccaccacgtcccccaggctggagtgcaatggcgtgatctcagctcactgcaacctccgcctcccagggttaagcaattctcctacctcagcctcccgagtagctgggattacaggtgcgcaccaccatgcccggctaatttttttgtatttttagtagagacagggtttcaccatgctggccaggctggtctcgaactcctgacctcgtgatccgctcaccttggcctcccaaagtgctgggattacaggcgtgagccttcacgctcggctgttttgttttgttttgtttgagatggagtctgttctgttgcccggggtggagtgcagtggcgcaatctctgttcactgcaacctccatctccccagttgaggtgattctcctgcctcagcctcccgagtagctgggattacaggcctgcatcaccacatctggctaatttttgtatttttagtagagatggggttttgccatgttggccaggctgatcttgaacacctgacctcaagtgatctacctgcttcagccttccaaattgctgggattacaggcatgagccaccacgcccagccaatacaatattgttttagtaaatgctatttttaattacccatatgcttctctatagtcatctttgttgcattcagggaatgataatttgatttcctactgttgcacctgttctttctaatgtaggaatactagatctgaggaataggaaagccagtaccagtccagttttattctgattaggagtgcttttattataaaagcagcacattagagagctctagggtttttcagtgttgaaatcctgtagtcacattactttaggaagaggtgagtgatcttaggaaatgtggaaacatgacagggcatacctgaaacacactaagtctgtactttgggaagggcagaagttaagaattaatctaactactactccaactgtcttaggtactgaagaagacctggaattttatgtcaggaagtgtggtgatattcttggagtaaccagtaaactaccaaaggaccaacaggatgccaaacatatccttgagcacgtcttcttccaagtggtggagttcaagaaattgaaccaggtacagagcctacaaggcacagtgtagtgggagcccctccagtactggtatcttccatggactgtgcttgccatgttttatgacgttgattcagcctgtaaatatttattaagcatctactaggtgaacaaaacagacaataaaccctgtacttatggaacctatatactagctggaggatgtagacaataagcagtaaacataagtgagtcacataggatgctagaaaatggtaagtgctttggtataaaagaagtggaggctgggcgcagtggctcacgcctgtaatcccaacactttgggaggctgaggtaggcagatcacccgaggtcaggagttcgagaccagcctgaccaacatggtgaaaccccctctccactaaaaatacaaaaattagccgggcatcatggtgcgtgcctgtaatcccagccactcaggaggctgaggcagatgaatcacttgaacccagaaggcagaggttgtggtgagctgagatcgtgccgttgcactccagcctgggcaacagtgagactctgtctcaaaaaaaaacaaaaaaacaaaacaaaacaaaaaaaaaacagctgggtgtggtggctcacacctgtaatcccagcactttgggaggccgaggcaggtggttcagctgaggtcaggagtttgagaccagcctggcgaacatggtgaaactccatctctactaaaaatataaaaattaaccaggtgtggtggtgcacgcctgtaatcccagctactagggaggccgaggcaggggaatctcttgaacccaggaggcggaggttgcagtgagccaagatggcaccactgtactccagcctgggtaagagagtgagactctgtctcaaaaaaaaaacaaaaaaatagagctgggtaagagggatcaagtgtgctgagtgtggccatgatgactggtgagtattaaatagggagatcagggtgggtttcattgcaaagttgtattggagcaaagatttgaaggtgttgagagacttagccatgcagatatctgggggaggagtgtcccaggcagaggggagatgtgtgcaaagttcctaaggctgggctgtgcctggtatgcttgacgaacggcagtgatgccagtgtgacaagagaacagaggaaaggacagagcagtagaacatgaggtgatcaccttatgtaagaaatgattttctcaggccgggcaccgtggcccacacctgtaatcccagcaattgggagcccaaggcgggcagatcacaaagtcaagagattgagaccatcctggccaacatggtgaaaccccatctctactaaaaatacaaaaattagctgggcgtggtggtgcatgcctgtagtcccagctcccatactcgggaggctgagacaggagaattgcttgaacctgggaggcggaggttacagtaagccaagaccacaccactgcagtccatccagcctggcgacagagcaagactctgtctcaaaaaaaaaagaaaaagaaatcatctttctctgactgaggaccaagaacttcaaaattatccctggccttcttttttccaaggatttcaaaaattgaatgcccaaccagctttggtaaataggcattcatacactactgatggagaataagttggttccacttgtctggagatatttttataatactgttgaaaagccctaaaatgtatataccgttgacccattctaatcttcagaatttgttttaataatataattcggaatacgtacagatttatcaaccaggattctcagtgccacattattttatagaagaaaaatcttcatcaatagggaactggttaagtatcctagggtacatccataagataaaaaatgtttttaaaaatgtttggccaggaatggtggctcacgcctgtaatcccagcactttgggaggctgaggcgggtggatcacgaggtcaggagttcaagactagcctgaccaacatggtgaaccctcctctctactaaaaatacaaaaattagccaggtgtggtggcgtgcacctgtagtccctgctactcaggaggctgaggcaggagaattgcttgaacccgggagacagaggttggcagtgagccaagaacgtgccattgcactccagcctgggagacagagtgagactctatctcaaaaaaataaataaaaaataaaaataaaaatgtttaaggacttgggccaggcgctgtggctcacatctgtaatcccaacactttgggaggctgaggtgggcggatcacttgaggtcaggaattcgagaccagcctggccaacatggtgaaaccccatctctactaaaaataaaaaaatcagctgggtgtggtggcccgtgcctgtagtcccagttactcaggaggctgaggcaagagattcgcttgaacctgggaggcggaggttgcagtgagccaagattgcaccactgtactccaacctgggcaacagagtaagactcaaaaaaaaaaaagtttaaggacttgggaatacattcgtgatacagtaaatatgtggtggggagagactaaagaacagtatatagagagattctactttctttacagaatacaatacacacatagaattattttgcataataaaaaaataacataaagatatttatccttggggcccagtgcggtggctcacgcctgtaattaatcccagcactttgggaggccaaggcaggtggatcacgaggtcaggagatcgagaccatactggctaacacagtgaaaccccgtctctactaaaaatacaaaaaattagccggccgtgttggcgggtgcccatagtcccagctactcaggaggctgaggcaggagaatggtgtgaacccgggaggcagagcttgcagtgagctgagatcatgccactgcactccagcctgggtgacagagtaagactctgtcccccccaaaaaaagaagatatttatccttgggctgggcacagtggctcacgcttgcaatcccagcactttggggggccaaggtaggtgaatcatttaagcccaggagttctagtccagcctgggcaacagaaactccacatccataaaaaaatacaaaaattagccaggtgtggtggtgtgcacctgtagtcccagctacttgggaggctgaggtgggaggatcatctgagcctggggaggttgaggttgcagtgagcagtgatcatgccactgcactccatccagggtgatagagtgagaccctgtttaaaaaaaaaaaaaaaagatagtgtttaatttttattttccttctttattaaaatttctatagtgggccgggcgcggtggctcacgcctgtaatcccagcactttgggaggccgaggcaggaggatcatgaggtcaggagatcgagaccatcctggctaacatgtgaaaccccgtctccactacaaatacaaaaaaaaattagccgcgcgtggtggcgggcacctgtagtcccagctactcgggaggctggggcaggagaatggcatgaacctgggaggcagagcttgcagtgagccgagatcacgccactgcactccagcctgggtgacagagcgagactcgtctcaaaaaaaaaaaaaaaattctatagtgactgtgtcacttttgcagcaaaaaaagagtgttttgttgtttaatgtaagcaggcaaaattcaagcttaggatttcagatgctgagtggaaagaccaattaggttctgagcctctcctggaaggaagctggctgtgccggatgctcatttggcagtgttttactctccacgtctagcatggtgctggaggctggggccatagcagtgaacaagatgattgcggttcttgctgtgcctctcagagctctgtgtagtgggagacagaagtgtattggcagttaccgtggtctaagtgccatccatgaagggaacccagagatgagggttttgatgtggctgctcagcagtgaatgatgggatgggaggtcaggtaggttcccagcagtactcactctggtggcatgctaggacagacacccgaggccaatataagaagtctggtgtggtctttgcaccagtgctttcaactctgtttgttactcatcatggtgggtggtgggcagtggtcacaagccctgccatggtagggcaaaaggatcaaaatttgatccttgggttggattcagccctaaagccagatattatgtatatgtcctaattaataaagattcagaatctctaaagtccaaagcactgaagagtttacatttcaggctttatactgaaatactaaaattctgtgtcttattctctcatccaggaacatgacatcgatacaagtgaaacagcattccagaacaatttctgaagaccatgcctcttgaagctttttctgcctcctgattctctctttgtaaactattttcaaattgtttttcaactccttatcaaaattgtttatacactctttcctccatgagctctggaaggtatatgcatcttctgtaatactcagataggtataagatttttcacaaaatccttatgtaagatacattccatttttaaaaattaaatgtatggttgcatctgtctttttataccctatgaaacagtcttgatttttttttctcaaccccagttctggatttgagtcttttatcaaagacataattaactctcaagcttgttgtaaatactgtacagctttctggaccggttgaaaggatacaacagtggctggacacggtggctcactcatgtaatcccagcactttgggaggccgaggcgggcggatcatttgaggtcaggagttcaagaccagcctggccaacatggtgaaacctgtctctactaaaaatacaaaagttagccaggtgtggtggcatgtgcctgtaatcccagctacttgggaggctgagacaggagaatcacttgaatctgggaggcagaggttgcagtgagccgagatcacgccactacactcccgcctgggtgacagtgagactctgtctcaaaaaaaaaagggggggatgggaggctaggtgcagtggctcatgcctgtaatcccagcactttgggagaccgagttgggtggatcacgagggcaggagatcgagaccatcctggctaacatggtgaaaccccatctctactaaaagtacaaaaaattagccgggcatggtggcacacacctgtagttccagctactcgggagggtgaggcaggagaatcacttgaacccgggaggcggaggttgcagtaaactgagatcacaccaccacataccagtctgggtgtcagagcaagactcttgtctcaaaaaaaaaaaaaaaaaaggatacagaacttaacccatagtctgtttaccccactgtacctaaagaagaagataaaagagtagacagataccttccttatatagatctcatcccttcatctcccagttgcccataggacacaaccatgtagagcaagcttgtccaacccgcagcccatgggctgcatgtggcttaggacggctttgaatgtggcctaaaacaaatttgtaaactttttttttttttttggagacggagtctcgctctgtcacccacgctggagtgcagtggcgcgatctcggctcactgcaagctctgcctcctgggttcacaccattctcctgcctcagcctctccgagtagctgggactacaggcgcccgccaccacgcccggctaatttttagtatttttagtagagatggggtttcaccgtggtctcgatctcctgacctcatgatccgcccgcctcagcctcccaaagtgctgggattacaagcgtgagccaccgcgcccggcctacaaatttgtaaactcttaaaacattatgaggccaggtgcagtggctcatgcttgtaatcccaacactttgggaggccaaggtgggtggatcacctgaggccaggagatagagaccaacctggccaacaggatgaaaccctgtccctacaaaaaatacaaaaattagccaggtgtagaggcctggtacggtggctcatgcctgtaatcccagttctttgggaggccgaggtggatggatcacttgaagtcaggagttcaagacaagcctggccaacatggcgaaaacctgtctctcctaaaaatacaaaaattacccgggtgtggtggtgcaggcctataatcccagcttctcaggaggctggggcaggacagtcgcttgaaccccagaggcagaggttgtggtgagctgaggttgtaccactgcactccagcctgggcaacagagcaagactgtctcaaaaaaaaaaaaaaaattagccagacatggtcaggcatagtggctcatagctgtagtcccagctacttgggaggctgaggtggggaaaatcattgaacctgggaggcagaagttgcagtgagccaagatcacataactgcactccagcctgggtgacagagcaagactgtcaaaaaaaaaaaaaaaaattaagagatagatgtgtttattattatttttatttttattttttttattttttttaagaaggagtctcgcccttttgcccaggctggagtgcagtggcgctatcttggctcactgcaaactccacctcccaggttcatgccattctcctgcctcagcctcccaagtagctgggactacaggcacccaccaccatgcctggctaattttttgtatttttaatagagacgaggtttcactgtgttaggcaggatggtctcgatctcctgacctcatgatccaccagcctcggcctcccaaagtgctgggattacaggtgtgagccactgcacccggccattattattatttttttagctcatcagccattgttagtgtattttgtgtgacccaagacaattcttccaatgttgcccagggaagccaaaagattagatactcctgatttagaagctgagcctggggaacaaaagtgaaagtccatctctacaaaaatgaaaattagccaggtatagtggcacacacctgtagtcccaggtatttgggagactgaggtggcaggattgcttgagcccaggagttcaaagctgcactagctatgatcataccactgcactccagaatgggccacccatgcttcttccctgtcctctggcttcctgaagcactcagttctatcatcatcttgggttataatgtagggccaaatttaatcatctgttccaaggaggctagagggtattgtcatgggacaatgggagagactgcacctgtcagaatggtgcagttggtgtatagaaatgcacagcagtgtactgacatacacagataaccagctttggggaactctgaaagccagatggaaggttgcagagccactgaggataggagaggagagaagggagaggagaggagaggaggggaggggaggggaggtgggaggaaaggggggaggggggaggggaggagcaattcccattgctgcacaatgggaatagtttagctggtgggttctataaagatgggaatggtagaaggatggtcatttacagaagagtttgatacaaccccaagagcaaataataaggatgtggactaaggtggtattataggaaaggtggcattttgaaacactttggtctgggtgttgaaagttagattggcaagatttggggcttgatttcctgggacagtgggggcagctattaaaagatggggagtctaggccaggcacggtggctcatgcctgtaatcccagcaatttgggaggccgagacgggcagatcacctgagatcaagagttctagaccagcctggccaacatggtgaaaccccgtctctactaaaaatacaaaaattagcctggcgtggcgggcgcctgtaatcccagctactcaggagactgaggtgggaaaattgcttgaacccgggaagtggaggtagcagtgagtcgagatcatgccattgcactccagcctgggtaacgagggaaactctattaaaaaaaaaaagatggggagtctgaaggatgagtggttttggagcataagagtccagttgagactatggcaattaatacaggtggaaataactagtaaatggctggaaatccctaatttaggcttagaaaagatgtccagtctcaagagtggagttgttcatatggagtggttaattaaagtcatgagaatcatttgtcaaagagtagtgttagaaatttaaaagcttgggaagaacagctcaagtcaaatcctgagtttcaaatgatttcttcatggtaaagctctgttcataggcttccattctctcccatactcaagccctagtacacggcttattcagagttgccagccagggcagggcactggggaacggggaagccactccaggggcagaagaatttgggggctctagctcaaagctgggagataagcagctagaggacaggcctggggagtgctgtggcagtgtgttccaaatacatacccaaaatgtgttcaatgattgtctcccaacccaaatgctcttctcttatcctgtgggcttgatgctcctcccattgagaggtggggtctctgttccctcctctgaatctttgaatctggcaccgtggcagaagtgatgctggtgacctctgaggctagttcataaaaggctatacagcttctgcctggttatcttgggacattcacctttagaacacaagcctccatgtaagaagtccaaggccacgtggataggccatgtataggtgttctggccaacagccagagatctcagtctataccagcatcttggtataaatcgcttgccaaacatgaatgatgatacctccaaatgactcctggccccaaccatcaagcacctcagccttttgtcatcccaattgaggtcccagatgtcatagagcagagacaagccatccctgctgtgttctttgtgaattcctgactcccagaatccatgaatataataaaatgggaaggaaggtgtgccctcactgccattttgttatatttgtttttatttttatttttgtttttttgttttgttttgttttttgagacagggtctcattctgtctcccaggctggagtgcagtgacacaatctcagctcactgcaccctctgcctcccaggttcaagtgattctcctgcctcagcctccccaatagctgggattacaggcacgtgccaacacgcctggctaattttttgtatttttagtagagacaaggtttcaccatgttgaccaggctggtctcaaactcctgacctcaagtgatccacccgcctcggcctcccaaagcgctgtgattacaggcgtgagccactgcgcccagccttgtttttgatttttttgagacagggtcttgctctgttgcccaggctgaagtgcactggtgtgatcatagctcactgtaacctcaacctcctgggctcaagcaatcctcctgcttcagctttccgagtaactgggactacaggtgtatgctaccatacccagctaattttaaaaaatgtattttaaaatacattgagtggctgggcgcagtggctcatgcccgtaatcccagcactgtgggaggctgaggggggcagatcacgaggtcaggaaatcgagaccatcctggctaacacggtgaaaccccatctctactaaaaaatacaaaaaaattagccgggcatggtggcaggcgcctgtagtcccagctacttgggaggctgaggcaggagaatggcgtgaacccaggaggcggagcttgcagtgagcggagatcgggccactgcactccagcctgggcgacagagtgagactcgtctcaaagaaaagaaaaaaaaaaaaaaaatatatatatatatatatatatatagagagagagagagagagagagagagagtctttcgtctgagccgccaaaatgccatccagactgaggaagacccagaaacttcggggccatgtgagccatggccatggccgcataggcaagctccaaaagcaccccagaggccacagtaatgctggtggaatgcatcaccacaggatcaacttcaacaaatactacccaggttactttgggaaagttggtatgaggtattacttaaagagaaaccagagtggccgggcgcggtggctcacacctgtaatcccagcactttgggaggccgaggcgggtggatcatgaggtcaggagatcgagaccatcctggccaacaaggtgaaaccccgtctctactaaaaatacaaaaaattagccgggcacggtggcgggcgcctgtagtcccagctactcgggaggctgaggcaggagaatggcgtgaacccgggaagcggagcttgcagtgagccgagattgcgccactgcagtccgcagtccggcctgggtgacagagcgagactccgtctcaaaaaaaaaaaaaaaaaaaaaaaaaaaaaagagaaaccagagtttctgcccagctgtcagccttgacaaattgtggactttggtcagtgagcagacacaggtgaatgctgctaaaaacaagcctggggctgctcccctcattgatgtggtgcaatcgggctactacaaagttctgggaaaggaaaagctcccaaagcagcctgtcattgtgaaggccaaattcttcagcagaagagctgagaagattaagggtgtcaaggggacctgtgtcctggtggcttgaggccacatggagggaggttcattaaatgctaactacttaaaaaaaacaaataggccaggtgcagtggctcacgcctgtaatcccagcactttgggaggccgaggtgggtggatcacctggttgggagttcaagaccaacctgaccaacatggtgaaaccccgtctctactaaaaatacaaaaagccaggtgtgatggcgcatgcctgtaatcccagctactcgggaggctgaggcaggagaatcgcttggacccgggaggtggaggttgtggtgagccgagatcgcgccattgcactccagcctgggcaacaagagtgaaaactccgtctcaaaaaataaatataaatttttaaaattatatatatatatttttgggctgtggggagctgggcatagtggctcatgcctgtaatcccagcactttgggaggccaaggcgggaggattgcttgagcccaaaagtttgagaccagcctgggcaacatagcaagaccccatctctatttatttttatttgagatgaaattgcagacatcatagcactttaccccaaaacaaataaatatctatagaaataaatattgcccaggctggtcttaaactcctagcctaaagcgatcctcccactttggcctcccaaaatgctgggattacaggcatgagtcactacacctggccttaaaatggcagttttaagccactgatttggagtaatttgttatacagcaataggtaactagaataaacacctgtaatcttacaaggaactttttggttctatctgaatctaatccaacttccactttcacttttcaaagggataactgaggcctagttgcggaagagactggcaatctgcctactaaccaggagtttctcccaccacgctctcctgaccaagaaggtgccttggaggaagcaaggcctgttctgccacagggtcagtaggcttttcgccttcatccatggatggcttgtggcaaggatatattttttctcccatttatgtgaaaactttgaaactaattgtgtgttctgtgaatgcttagctctcttgaattggggtaatggttattgtttatagagcataagccaagttttatattctacaatgcaaacaggtacctgtttctaaataaaactgtttacattaaaaaaagaaaaaacaaaactttgagggccgggcgtggttgctcatgcctgtaatcccaccactttgggaggccaaggtgggcagatcacttgaggccaggagttcaagaccagcctggccaacatgacgaaaccccgtctctactaaaaatgcaaaaattatccgggtgtggtggtgtgcgcctgtaatcccagctactcaagaggctgaggcaggagaatcccttgaacccgagagacagaggttgcagtgagccaagattgcatcactgtactccagcctgggcaacagagcaaaactccgtctcaaaaaaaataaaaaacccactttgaaacagaaaagtgtgaagaatactatattaaacaccagtgtgcccatcagactttaaaaaattgttaatatattgccatatatgctttccgtatgtataatcatttttatttttattttttttacatgtagaccttaaaatcccaatgtataggccaggcgcagtggctcacgcctgtaatcccagcactttgggaggccaaggcgggcagatcacttgaggtcaggagttcaagaccagcctggccaacatggcaaaaccctgtctctactaaaaatacaaaaattagccgggtgtggtggcgggcgcctgtagtcccagctacctgggaggctgaggcaggagaattgtttgaacctggcaggcggaggttgtggtgagctgaggttgtgccattgtactccagcctgggcgacagagcaagactctgtctcgaaaaaaaaaaaaaatcccaatatatgcataatcttttttttttttttttttttgagatggagtcttgccctgtcacccaggctggagtgcagtggcataaccttggcttgctgcaacctctgcctctcaggttcaagcgattctcctcctgagtaactgggactacagccatgagccactgaccctggcctgtataatcaatttttttttttagacagagtcttgctctattgcccaggctggatggagtgcagtggcacaatcactgcaaccttcgcctcctgggttcaagtaattatccttgagcctcccgagtagctgggattacaggcatgcactaccatgccgggctaattttttgtatttttagtagagacagggttttactatgttggccaggctggtctcaaactcctgacctcatgatccgcccgcctcagcctcccaaagtgctgggattataggcgtgagccacgtcacccggccctgtataatcttttttaccaaacatttgaaatgaaattgcagacagaatagtattttacccctaaatacttcattgtataatgccattatcatttctattacttaatgtttaatacatattcagactgtcccctaattgcccccagaatgttttatagatttttttttcaagccaggatttagtcagtcttcacacattgtatttgactgtctctttaaatccagaacagtctccctcttttttttacaaatgatctttttttttttttttcagacagggtcttgctgtgttaccccggatggaatacagtggcacaatcatagctcactgcagcctcaactttctggactcaattgatcctcccacctcagcctccacagtagctgggactacaggcgtgcaccaccatgtccagcaaattctttaattttttgtaaagacagggtctcactgtgttgcccaggctggtctggaactcctggactcaagtgatcctcccaccttgccctcccgaagtatttggtttacaggcatgagccactcctcctgaccagacactgattttttgaaaagatcaaattaggggtcttgcagattatctcacattctggatttatctcattgcttcatcatagtgtctattaatttgttcctttatcttatttcctgtaaactgaagttaggtctgaaggcttgactgtgaattaaacatttttggcaagaatatttcataggtggtgatgtcagattagtttttattagtaaaattaagcttaactagctaaagtggtgagcaggggtgttttgttttgttttgttttttgtttttttgagacggagtcttgctctgtcgcccaggctggagtgcagtggcacaatctcggctcactgtaacctccgcctcccaggttcacgccattctcctgcctcagcctcccgagtagctgggactacaggcgcccgctaccacgcctggctaattttttgtatttttagtagagacggggtttcatcgtgtgagccaggatggcctcgatctcctgacctcgagatccgcccgcctcggcctcccaaagtgctgggattacaggcgtgagccacacgcccggcgcaggggtgtttttaaattcaaacaagtgttccaacttcactcttaaaaataaaaaagcaacgacaaccaaaaacaaaaccaaaagaagaaaacatatataccagtcctagcaggtaacagtgtaaaaataactggagatcgcgccactgcactccagcctgggcaacagagcgagactccgtctcaaaaacaaaaacaaaaacaaacccctctgatccccgagttttctgggagactgatttgagtaataatacaactctggtctcccgcacagcccgctccgcgcgtgaattaccctttctctattgcaattgccgtcttgataaatcggctgtgtccaggcagagggcaaggtgaaaccccttcggcaaccttacagggctgcccttccgcagctcacagcctaattgctgagagaaattaacctaataatagttgcaaacggaacaccgggcatgcagtgtgaggggctggtccagagcctctgacccacactgggaagtcatggaccgttcaggggtcgggggcgacacaatgtccgaggtctgcgacgtccctcccttgctccctctcatccctgcgactttctttcacccgtcctccacacgaacgagaccacgccaccgagaagaagcctctggggcgcggggctggttagagccccagagccgtcgcagcccggctccaggtgtacctgcgcacaggcgccccacggtgacgtcagggacgcgactcccgcgatgccccgcgggccgcctgatcccaggcgcgggctcagactgggatctcggagttcccctgcgccctcctgacggtgcagtctggcggcccgtggcgcgggcgctgccatggagcatcctggagcctttggcctcggtttacatgggaggcccctcgaaacagggcacgtcacttgccccgggtcacctgcgggcggcgagactctcgggttgactccaaggcctgacattcccctccggttttcacggaggagggtgaggatgttgccaggagctgccgtaaggctggaggagcttgcggttgggtccacccgcctctgggcaggccttagcgttcacccgcggtttctccctgactttgaacccaaactccctaccccgcaagtccttccctgtttgattgctgaactccaagtgacagaagaactgaactgcaagtgacagaagaactaagtgttggcgaaagctgatgctccagagggtgcagagtagaggtcaggggtgggggcctcgccatggggtatgtataatgtagcccagggtcctggcaccgagtctcttcaggaatgcaagggatttggattagatggtgtcttagagatctaaattatccccctttgcaattgcatacctaaagaaaccgctagggctggcatgagcctggaaaaacacaggcagggttaatggccctgtcctttagtcagtggccccacacttcttccagtgactcagaaggggcccctggagtcatgcaaatggaacatatccatcatgcgccaaaacgtgcttgtgtctccttgtaatcccttcctctccacaaccattgtcactttagattggtttctgtcactttagatttgtgtgtaacttctagagtttttttttttttttgaggcagagtctcactctgtcatccaggctggagtgcaatggcgtgatctcggctcactgcaacccctgcctcccaggttcaagtgattgtcctgcctcagcctcccaggtagctgggattacaggcgtcagccaccgtgcctggcctagagttttatataaatagtcttataggccgggcatggtggctcacgcttgtaatcccaccaccttggtaggcctaggtgggtagatcacttgaggtcaggagtttgagaccagcctgacatggcgaaaccctatctctactaaaaatacaaaaattacccgggtgcagtggcttgtgcctataatcccagccacctgggaggctgaggcagggcaatcacttgaacccaggaggtggaggttgcagtgagccgagaacatgccactgcagtccagcaggggcgacagagtgaaactccatctcaaaaaaaaaaaagaaattagcctggcatggtggtgtgtacctgtagttccagctactcaggaggctgaggtgggatgatggcttgagcctgggagatggaggctgcagtgagccaagatcgctccactgcactccagcctggactatagagccagaccttgtctctaaaaaatttaaaaattaagaaaaaaatcatacagtatgctctcttttgcttcttttggcacagtttgtaacttatttatattttatcaataatttattccatttgctgagtagtattccactgtatggatatatttgttttttatctataatttgtttattcagtcacctgttgacatttaggttgtttccagtttggggttgtaacaaacaaagctatctaaaagctttgtgtggagatatgtattcatttttcttggagtgactagatgatatgataggtgtatatttaaggtttttttttcttctttttttgagacagagtttcgctttgttatccaggctggggtgcagtggcgtgatcttggctcagtacaacctccacctcccaggttcaagtgattctcttgcctcagtctctcgaatagctgggattacaggtgcgcaccaccatgtccagcccttttttttttttttttttttttttttgagatggagtcttgctctgtcgcccaggctggagggcagttgcgcgatctcggctcactgcaagctccgcctcccgggttcacgccattctgcctcagcctcccgagtagctgggactacaggcgcctgccaccacacccggctaattttttgtattttttagtagagactgggtttcaccatgttagccaagatggtctcgatctcctgacctcgtgatccacccgcctaagcctcccaaagtgctgggattacaagcgtgagccactgtgcctggccctatttaaatttttaagaaacagttttcaggctaggcatggtggctcaagcctgtaatcccagcctttgggaggccaaggcaggtggatcacgaggtcaggagtttgagaccagccagtctgagtcaccccggtcaacatggtgaaaccccgtctctactaaaaatacagaaattagtcaggtgtggtggtgggtgcctgtagtcccagctactcgggaggcccaggcagaagaattacttgaacctgggaggcggaggttgccgtgagccaagatctcaccactgcactccagcgtgggatacacagcgaggctctatctcaaaaaaacaaacaaacaaacaaaaacagttttcaaagtggttgtacaattttacattcccaccagcagtatttgagaattctaattgctccccatcttcatcaacatttggtataattagtctttttaattttagccattctaataggcatgtaaatctcattgtggttttaatttacattcccctaattacatggtattgagcatcttttcatgtgcttttgccactggatataggatttgcagatggatcagatacgtgatgtgagagaagagtcaatgattttgaacccttgccgatccctgagtacttcctaatccccctcctccttgccatgtgctggctatttcctgtgccattccctgcattgcaaattcctaaatcatccagctctaaagagccttcagtgatcctgttgggtgggcactcacagtcctggcaattgatcttcacctgtacagagctaattttccactcattatcttctgtaccagttggtgagcttcctgagaatatggatggttggattttctcgttatgactaacctctagttgtagcccagactcagactttgagtatacatcacaaatggtactctccaatctcatatcaagttgtggatgttttgcttcaagctaccagcccttagctatgtgatcagtgccatttacttaatatctctgtgtcttaatttgtttgttgttaaaatgttacctgccgcacagagtaataagcattaaatgcaaaataagccagcgcagtggctcatgcctgtaactccagcaagttgggaagctgaaatgggaggattgaacccaggagtttgagcttgtttgagctcaggagttcgaggctgcagtgagctatgatggcaccattgcactgcagctccccagattggagtgcagtggtgccatcataactcactgcagcctcaaaccagagtgagaccccatctctaaaaaaaaaaaaaagccaaaatgaatgtaaaactcaatatggtgccaggcacatagtgtcttccctaaaaaaatcatcctgttattcttatcttttttttttttttcctagacagggtctcactctatcacccagctcagagtgcagtggcaagatctgggctcactgcaacccctgcctcccaggttcaagcaattcttgtgcctcagccttccgagtagctgagactacaggtgagtggcaccacacctggctaatttttgtattttcagtagaaatggggtttcaccatgttggccaagctggtctcgaactcctagcctcaagtaatctgcccaccttggccttccaaattgctgggattacatgcgtgagccaccttgcccagccaagctgttgttattttctgatctgaatactttgatagtccatttctgaaactcaaagataggtgttttgaaaatggttattaatgtaatctcaatcttttgagtagtaaaagctgactttgggggcctggcacggtggctcacgcctgtaatcccagcactttgggaggccaaagcaggtggatcacctgaggtcaggagttcaagacaagcctgaccaacatggtgaaaccccatgtttctactaaaaatacaaaattagccgggtgtggtggtacatgcctgtaatcccagctacttggcaggctgaggcaggagaattgcttgaacccgggaggcagaggttgcagtgagccaagatcatggcgccattgcactccagctgggcaaaaaagagcaaaactgtgtcaaaaaaaaaaaaaaagcaggtattgaattagtttgattccttgaatcaagtaattgaattgctttccttcctccttccattgagatccacattgttgtagaaagtgtccctttccaggctgagtccttggcctcttatgtctatatggccacttgtttgctaccatgtctctgttctctacactgatgccctggagtgggacagaagagtctgaaaaacatccctttgtttcaaaatctctctctctcatttttagtagaaacgagatctagctgtgttatccaggctggtcctgaactcctagcctcaaactatcctttcaccttggcctcccaaagtgttgggattacaggattacatgtgagccactgaacccagccaacaggtgtatgtaatagtttaaggagacttggtatttaggttttgatttaacaaatttttttgtacagacgggggcggggggtctcactatgttgcccaggctggtctcgaactcctggctttacacaatccttccaccttgccctcccaaagtgctgggattattacaggtatgagtcactgcacctggtcccaaatctctttttgagacagagtcttgctctgtcacccaggctggagtgcagtggcacagtttgggctcacggcaacctcctcctcctgggttcaagtgattctcatgcctcatcctcctgagtagctgagactgcaggtttgtgccaccatgcccaggtaatttttgtatttttagtagatatggggtttcaccatgttggccaggctggtctcaaagtcctgacctcaaagtaatttgcctgccttggccttctaaagtgctgggattacgggcatgaccactgtgcccagcctgaatctcttttgatgacccatattttatgagatacaattcaaactctagcattcccagctttctcacttgaggtccaagcctttctaactctccagcccaaatgttagctttgtaacattgcatccactcaatttaaatggaatgtgtagaaccccttccatgagtacctaccagaagccaagctatagtaaaggtctgaagcttaaaatgtgcacaggctgtcctttctcttgagagagaaataaaatggtggaggaagtgtgatgaggacaagaatgataaggaggatgctctggaggtggagggggaagactccagccagaagggccatgtgattctacttatcatcaattagtgtttggtgtccaagctggtgctgagccctgagcatttaataaattgatttgacccttatcttcccaacacagggtcaggcctgggggttggggcaaattgtggaataaccaaatacctggagcctccctgtccaaggagggcgtgttcaggaaaagtttcccagcagagataaattctgtatgttactagtccagagtccagggaccactcccaggtgtggtttcactcgggacactgggaatcctctctccaggggatatctgttggtatgatgataactggagaggaaatgtgtggagatcatcagattccatctggcactagggtgatctccctgctgcctgactcacagcactgactccaggcttctttggctctggggcattggttaactggccccagttccaggttgcaagtgcactctgcagctgttccctgcctcttgctttgggcagataccttgcccaagctgtcaggtcctgcctctccctgaaatgggatgactaatgtgtggacctcaaaggataagagtgagggcagctgaagaattacagtagtaataatagctaacagtaatatagttctttttttgctgggcgcggtggctcacgcctgtaatcctagcactttgggaggccgaggtgggtggattgcctgagatcaggagtttgagaccagcctggggaacatggtgaaaccccgatctctattaaaatacaaaaaattagccaggcgtggcggagtgcttctgtaaccccagctactcgggaggctggggttattgagacggagtcttgctctgttgccaaggctggagtgcagtggcacgatctcagctcactgcaacctccgcctccaggttcaagtgattctcctgcctcagcctcctgagtagctggagttacaggtgcatgccgccacgcccggctaatattttatatttttagtagagatggggtttcaccatgttggccaagctggtctcaaactcctgaccttaggtgactcactcgcctcagcttcccaaactgctgggattacaggcatgagccactgtgcccggccaatatagctctcattatgtgccaggaactgtttttggtgctttacacatattaatttatttaatcctataattacctacaaagtatagtgattaagagcatagactctagaactagacaggccaggtttgaatccctgctctgccatttactagcactgtgaccttggggaagtctgtgcctcagttttcccatctgctaaaagaggataatcccagtatctacctcatagagttgttacaaggattaaatgagttacaatttataaacagaatgctggctggaaatattagctgggcatggcggcgtgctcctgtaaccccagttacttgggaggctgatagtttaaaaactatctaaaattttgataaatcccatttttccaggtgagaaaactgaggcacagaagagttaggtaattggctgggcatgatggctcatgcctgtaatcccagcactttgggagtctgagtcgggtagatcacctgaggtcagaagttcaagaccagcctggccaacatgatgaaaacccatctctacaaaaatacaaaaaatagccaggcatgctggcgcattcctgtagtcctagctactcgagaggctgaggtgggagaatcatttgaatccgggaagtgggggttgcagtgagccaagatcacaccactgcactccagtctgggcaataaagcaagacttggtctaaaaaaaaaaaaaaagttaagtaatttgcctaagataccgcaactgaatggtggagctgggactcaaaccccaggaagtttggctgtggaggctgtgctttcaatgaagtgggcatgtccacattaattactttataaggggagtgggcgggagaaaccctgaattaagtgatgtggaagcttctagcacttaagatgtgagttagtcttccttctgtggtaagtgaagtttgcagcagctggtggctggactgtccccaggtggccagcagcttctggaagggggctctgaggcctgaacaggggctaaaaggctggggtttgatttggtttcttcagcgtcctgtctcagagctcatttatcttcctctcagcactgctcccaggaagtccagtgtgacttgatccttggtacttggtaaatgtcaatctaatatagaaaacctttgctaaatctcaaggaaagacagtctcactgtctgtcgcccaggctggagtgcagtggcgggatgacaagggcttgagcccctcgaactcctgggctcaagcaatcctcctgcctctgcttcccaagtagctgggattacaggcattcaccaccacagccaggtaatttcttaattttttgtaaagacagggtctcactctgatccccaggctggtctcaaacttttggactgaatcagttctcccacctcggcctcccaaactgctaggattactggcatgagccactaaatctgggctaatctctgggagtttaaacccaaggtaaacaattcaatgcaacaaacctttgcctggggcttcttatgtcaggtcttctactgggccctggagatactggtgtgcattgagaggccacctggacctcaggatgctcccagttcaaagggggaaatgcagaagtctacaggcagattgtgggcagtggaccccaaattaaataggaatcagccacgtgggaggggcaggaagtgttcctgccctgggtaatggctcaggcaaaggcaaagaggccgtttcttttggccagggctgggtggtggtctggaagatcagataaatgtgattgtggagtaaggaatttaccctgagggagaggaggatggttttaaattctggaaagagctcacgcctgcaatcccagcactttgggaggacaaagcggcaggatctcttgagcccaggagtttctagaccagtctaggcaacagcaacatagcaagacacccccttctcttaaaaaaaaaaaaaaaagcgcagtggctcactcctgtaattccagcactttgggaggccgaggcgggcggatcacgaggtcaggagacctataccatcctggccaacatggtgaaacctcgtctctactaaaatactaaaaaaaaaaaaaaaaaaaaaaaaaaattgccgggcgtggtggtgtgcgcctgtagttccagctacttgggaggctgaggcgggggagtcgcttgaacccgggaggtggaggttgcagtgagtcaagatcgcgccactgcactccagcctggcgacaaagcgagacaccgtctcaaaaaaaaaaaaaaaaaaaatcagccgggtgtagtggcgagtgcctggtcttagctacccgtgagttgaggtaggaggatcgcttgagcctaggaggtggaggttgcagtgagctatgatcgcgaaactgcactccagcctgggcgacagagcaagaccctgcctctaagaaaaatgaacaacaaaaaataaagtctattaaggagggtctcttggaggcaggagaggaagcagggagaggcacaggtagggtgaggagccgctttagggtgcggctctagggacccagtagtggcttggactagcgtgggggattccgccctggcgctttccctggctggctctcccatgctcgcgcctcgctccccttcctcggtcttcgctatgtgggatactcctgggccgccccggactgacacgtgagccaggcctcggtcacatcccggcccgctccacaactccgaagtagcggccgccgcccctgtcctgcagccggccctggagggtctgggcaggtgccgccccgcaggccccgccccgccccgccccctggctccgcccctcactcaggcccctcccccggcgcccgcgcgccaggactgggcggcgccgacgcgcttggcgggagatagaaaagtgcttcaacccgcgccggcggcgactgcagttcctgcgagcgaggagcgcgggacctgctgacacgctgacgccttcgagcgcggcccggggcccggagcggccggagcagcccgggtcctgaccccggcccggctcccgctccgggctctgccggcgggcgggcgagcgcggcgcggtccgggccggggggatgtctcggcggacgcgctggtgagacgagccgggagggcttgggcccctccccctccctttaactcacccctcccccacccagatacccccgaccctccccaggctcccaccaagctggggtgtgtgtgtgtgttgggggtggggtgtttccgcggaaatgctgcgtcctgggccctctgaggcaggggcgcgcgtaaagctggggggctcttgggcgtccctcgcggctccccaggcctgttgggcctcggagctgggacgggcgggtctcttgggacccgggccaagccgtgcatgatgtcattttgtctcccgcctaattgcgggatgggggtgggccggccggtgtcagctggcagggccttcgccggcgagggaggcgacccctgggagcgagagggagtcttcaagtcccagccagtgggagaccgagcctgggaggcacttgttgcagcctagttttgggtcaacttggtgggtgggctttgctccttaacattccggggagcacagagtcccccaagccctctcccctggactgagaagggtgctgagttgggggctcttttgtctctcccacctgggttccgcgccccagcttggttcggtttgagacctctcttcctgttcccacgaggagttttgggcagctggggttgaaggtgcgggggagagagagagtccctggggcaaaggcaggaactgcggtctccattttacttatttccccagagacttaagtggcagagctgagcccggagccaggtctgtggctccagatccctgtcttacacctgtgcgcctggggcctgagctccaagcttttcagcctgcctgggagacaggacagtggggtcctgacctcttccctgcctggatcgctgcagctcagataaccttcgttccctcttttttttttttttttttttttttgagaaggagtctcgctctgatgcccaggctggagtgcagtggcgcgatcttggctcactgcaacctccgcctcccaggttcaagcgattctcctgcctcagcttcccgagtagctgggacttcaggcacgtgtcaccacgtcgggctaattttttgtatgtttagtagagacagggtttcaccatgttagccaggatggtctcgatctcctgaccttgtgttccgcccgactcggcctcccaaagtgctgggattacaggcgtgagccaccttgcccggccaaacttcggtccctctttagacgatagcctcatctaaagatgaagccttccatccctctagatttttgccctttcaggctgaggatagggatctgagcacagggactgtgttcctcaggccccactttcccaggccaatgtccaggaagagttttctgttcaggcgcctatcagaccctgccctggttttttttttttttttttttgaggcagggtctccgtctgcagtccaggccggagtgctgtggtgctgtcatagctcactgtagccccaacctcccaggttcaagtgatcttcccaactcagcccgctgggactgcaggctgagtagctgggactatgggcacgggccgccacaactggctaatttatttaattatttaggagacagagccactctgtgttgcccaggctggagtgcagtggcacaatctcggctcactgcagcctctgcctcccgggttcaaggaattctgtctcagcctcccaagtacctgggactatgggcacacgccgccacgcctggctaattttttggatttttagtagagatgggtttcactgtgttgctcaggcaatccgcctgccttggcctcacagagtgctaggattacaggcgtgagccaccgcgtctggcgtgttttattttgtgtagagatggaagggggcgggagtggcctcgcgttgtgtctcacctcactatgttacccaggctggtctcgaactcctggcttccagggattctcccccacttggcctcccaaagtgtcgggattacaggtgtgagccaccttgcctggcgccatcctgattttttgttcaggaagagttattccaggagtgactgcctctagaccaccccaggtcctgggctacttctcccatgaggggctcagtggaggaacccctcctgtgtgaaggatggcagctccacagccctcagcccatttcctggccacttgctgtaactctcctctgccctagtgccccacttcccgctttgtctctgactcacccctgtcctggagcagagcccagcacgttgaagggcaaaaggtagggtatgttggaccacaatgtggttgccaccactaactggactctgctttttcagctgggattaggatatgaggacttgcaggtgtctggagttaggaaggttcagagcctggctctatgaacttggcaggtggcctcacccctctgagcctcaatttccgcatctgttaagggggataatgagaatgtgggtgaagttgatggccagcacatatggtaaagtatatcatctcacagaaatgccccagctgtctgagatgctgaccctatcaaacagcattggaggctgggtgtggtagctcatgcctgtaatcccagcactttgggaggccaagagttcaagaccagcttgaccaatatggtgaaactcctcgtctctaccaaaaatacaaaaattagccgggcgtggtggtaggcgcctgtaagcgcggctattcgggaggctgaggcaggagaattcacttgaacccaggaggcagaggttgctgtgagtcgagatcatgccactgcacttcagcctgggtgacaaagcgagactctatctcaaaataaacaaacaaacaaacaaacagcattggagcaccagggagtgtccatgcagacatcatttcatccttgaaagaatatttgctgaccttctgttagaagccaggcctttgtgctggatgctggagaagcaaagatggtttctgtcacgagctgtctgggggcagttgattttaaagccaacttcattctgttattagtatcttctggatttttgccttctatattgaagtggtggaggacccatgaactgggtcaggaatgaattccagatccttctgtattgctgactgtagacaccgtccctcctttcctatttctgaaaatttttttcttttgaaattgggtcttgcctggcctaaaaaatttaattagtatttcttattgactaataggcagcagctttgcacattttttcatttatttgtatattcagtcagtccctgggcaaacatttcttaagcccttttggtgataaaccctgggatgccaaggtggagctgacctttgtagatgatgtggaggagacaggcagttgcagtgtaagggcccgagacaggagggtttcccatgtgctatggaagtataggagtgactctaggaagcaacggtgagctttggagaacaaggagaaggtaatgtggatagcacagtaagccttctttcatttgtttcatttccaaacaagacttgccttgtttggaaacctgtaagctttttccagtttacaaatgtctgacctagcaacttacctgaccaacgtgacctgatgcaggtcctgtcgggtggagttggggaaagattactaactttcctcaagcacctgacatctctggaggtggatcctatgatttcttttttttctttttttttttttttttgagacggagtctccctctgttgcccaggctgcagtgcagtggcacgatcttgactcactgcaacctctgcctcctgggttcaagcaattctcctgcctcagtttcccgagtagctaggactacaggtacatgccaccatgcccagctaatttttgtgggtttttatttatttattttttttgagatggagtctcgtctgtcgcccaggctggagtgcagtggcacaatctctgatctctgctcactgcaacctccgcctcctgggttcaagcagtttttctgcctcatcctctcgagtagctgggattacaggcgcatgccaccacacccagctaatttttttgtatttttagtagagacatcatttcaccatgttgaccaggctggtctcgaactcctgaccttgtgatccacccacctcggcctcccaaagtgctgggattacaggtatgagtcaccgcgcccggctgatttccattttttttttttttttttttttttgtgagatggagtttcgctcttgttgcccaggctagagtgcaatggcttgatcttggctcaccgcaacctccgcctcccaggttcaagcgattctcctgcctcagcctcctgagtagctgggattacaggcatgcaccatcacacccggctaattttgtatttttagtagagacggggtttctccatgttggtcaggctagtctcgaactcccgacctcaggtgatctgcctgccttggccccaaagtgctgggattacaggtgtgagccaccacacctggcccgatttccatttttgtaactattaaactggataaatacgaggattttttggagcaacttggaagattgccttgtagagtaaaaacacccagaattcaaagcagctcgtactgttttttttttttcccctacagcggcgttagaagatattgtacactgggccgggcgcggtggctcacgcctgtaatcccagcccgttgggaggccaaggcgggtggatcacgaggtcaggagttcaagaccagcctggccaagatggtgaaaccctgtatctgctaaaaatacaaaaaaaattagccgggcgcggtggcaggcgtctgtaatctcagctactcaggaggctgaggcaggagaatcgcctgaacctggggggcagaggttacagtgagctgagatgtcgccacttcactctagcctgggtgacagagtgaaactccgtctcaaaaaaaaaaaatagatactgtacactgatttttctctccattaattatgcctgtgtgtaggcaaggattgaaaagggatttgcaaaaatggacataagccagacacggtggtgcacacctgtaatccaagttactttggaaggctgaggcaggaggatcccttgagcccaggagttcaagaccagtctgggtagcatactgagaccctgtcattacaaaaaaaaaaaaaatcaacacacgaaaaaacaacttggccagtcacagtggctcaggcccgtaataccagcactttgggaggccaaggtgggaggattgtttaaggccaggagttccagatgagcctaggcaaaatagtgagatgtttctacaaaaaaatacaaaatagccaggcatagtgtcatatgcaagttgttccaggtacttgggaggctgaggtgggagaattggattgcttgagcctaggagttggaggctgcagtgagctgtgattatgccactacattccagtctgggtaacagagccagactctgtccctaaaagaagaaaaacaacaaatggacatagagaatatattcagaattttttttccaaataactaatatctcttaaaatcttgatgcctgttaacttcatcaactttattccttaaaatatccatgcaggtttgttactgaaaggaaaaagcgatagtctgattttgaacataatattcttggtgaaatcttaactttctttttccttttctttttttgagacagtcttgctttgtcacccaggctggagtgcagtgacatgatctcggctcattgcaaccttcacctcccgggttcaagcaattcttctgcctcagcctcctgagtagctgagattacaggcatgcgccaccgcacccagctaatatttgtatttttagtagagatggggtttcactgtgtttgatcaggctggtcttgaactcctgacctcaagcaatccacccacctcggcctcccaaagtgctgggattacaggtttgagccactgtgcctggcctcttttttttttttttttacagcttttgaaatcactagggcattcctgaaaataaaaaagaagaaagtagctcttaaccctatttcattaaaaaatttaaaaagaggtgaggtcgggtgtggtggctcatgcctatagtcccaacactttgggaggccgtggtgggaggattgcttgagcccaggagttcaaaaccaccctgggcaatatggtgagaccccgtctctacaaaaaatacaaaagttagccgggcgtggtggcatacccctgtagtcacagctacttaggaggctggggcgggacgatcatttgagtccaggagttcaaggctgcagtgagctacgatcatgccacactgaattccagcccagtgacagagtgagaccctgtctcaataaaaataagtgaagcagaagtgcctatgtcttaaaaagaagaaaaagtaagagcctctctcccccagacctttccctagggtgggctggccgctgcctacacgttctccattatgtaaaacatatggacacaccatccttgacccttggcctgctttccccatagcgaggatctggatgagctgcactaccaggacacagattcagatgtgccggagcagagggatagcaagtgcaaggtcaaatggacccatgaggaggtgagtgccatggggaagagagggttgatggcagctgggggctgtccagaggaactgagcctggagtgtatttgatgtctcatcagatgggatgaagaggaggagccggtgaaggaagggatgggtcctctgattgtcctcatgcctcttctcagagcattctgggggattctcaattttgaggactcagtgggtgggaaggggatgtgtgtcctagacctcagggcccattgtgtctcctgagcagctgccatgttctatgtcatggacattgattgtgctttttgccttttgactgctaggaggtttggccaaatctgtaactccccccaccctttttttttttttttttttgagacagagtttcgctcttgtcacccaggctagagggcaatggcataatctcagctcactgcaacctctgcctcctgggttcaagcgattctcctgcctcaggtgcgattacaggcgtgagccaccacatccagctaatttttttttttttttgagacagtctcgctttgtcacccaggctggagtatagtggcatgatcttggctcactgcaacctctgcctcccaggttccaagcaattctcctgcctcagcctcccgagtagctgggattgcaggcatgcgccaccatgcccagctaattttttttttttgtatttttagtagatacgggggcttcaccatgctggccaggctggtctcgaactcctgacctcatgatctgcccgcctcggcctcccatagtgctgggattacaggcgtgagccactgcacccggccttaatttttgtattttttagtagagacggagtttcaccatgttggccaggctaatctcgaactcctgaccccaggtgatccacctgcctcggcctcccaaagtgctgggattacaggcatgagtaaccgcaccctgccaactcccactttctttttctaaaataattaactgtattgaaccttctgacatcaagccctgaattggtttccttctagctccatctttttattttataataaatgtgattgaaatataatttatatgtaatcatatgcaatcaaatgccctttttttaattcctttttgagacagggtttttgctctgtcacccaggctggagtgccgtgctagcatggctcactgtagcctcaactttctgggctcaagcaatcctcccccgtcagcctcctgagtagctggaaccacaggcatgcgccaccacgcctggctaatttttgtattttttgtagagacagggtctcgccatgttgcccaggctggtctcaaacttctaggctcaagcatttctcccacctcagccttccaaagtgctaggattataggtatgagccactgtccctggccaaatgcccctttttatggtgaacagtttgatcagttttttttctttttttttttttgagatggagtctctgtctcccaggctgaagtgcaatggcgtgatctccactcactgcaacttccgcctcctgggttcaagcgattctcctgcctgagcctcctgagtagctaggattacaggcacccgccatcatgcccagctaattcttgtatttttgtagagatggggtttcaccatgttggccaggctagtcttgaactcctgacctcaagcaatccacccaccttggcctcccaaagtgctgggattacaggcatgagccactacggtgagccggtttgatcacttttgacaaatgcatataccaatgtaagcaccaccctgattatcccaagaagttttctgtggtcctttgtggtcaggcttccccagctccaggaaattgctgatttgatttgttttgcctttttctttttgggggctttgtgtgtgtgtgtgtgtgtgtgtgttgtttttaactttaggttcaggggtatatgtgcaggtttattatataggtaaattgcatgtcgtgggagtttgatgtacaggttattttgttacctaggtaataagcgtggtacccaataggtagtttttttttttttaaggcagtctctctctgttgcccaggctgtagtgcagtggtgtgatctcagctcactgcaacctctgcctcctgggttcaagcgattctcctacctcagcctctcaagtagctgggattacaggcacgtgccaccacgcctggtaaatttttgtatttttagtagagacaaggtttctacttgtctctactaaaatgttcaccaggctgatcttgaactcctgacctcaggtgatcttcccacttcagcctcctgaagtgctgggattacaggcgtgagccactgcacccagccccaataggtagttttttgatcctcatcctcctcccaccctccaccctcctcccaccctccaccctcaagtaggccctggtctccttgttcccttcttcgtgtccatgtgtattcagtgtttggctcttacttatagatgagaatatgcggtatttggttttctgttcctgtgtttgcttaggataatatgttttgcctgttcttgaatcttctataaatgaaatcatacggttacattctttgcgtctggcttttgctcagcattgtgttgggtgattcagtaacttgtccttttctatcactggatagtagtccattgtatgggtataccacacagcgtttcacctgttgatggatgtttggactgtttgcagtttttggctatcgtgtatagcgctaccttgaagattcttgcataagtctttttgcaaatacatgtttccctttcttttgggaagataggtatggtcatggggtaggtgtatgtttagttttacagaaactgcctttttcttaatggattgtaccattttagacttctactggcctttttattttacctcagtttttcttagtgtcttcagttcttcagtgttttttgttttgttttgttttcaacccatagttaacatcatagatgtctttaattttaggattgggtttttttttttgtattgtattatttgtattgcttttgttttttgtttttaaatagagaagagggtcttgctatgttgcccaggctggtctcctgggctcaagcaatcttcctgccttggcctcccaaagtgttgggattacaggcagaagccaccatgactagcttgttttgttttttctaaaacttgctgtgtgagtggtaaactccttttaaatcatgaaagatgtttttccagatgcgtgctaagcaaaccttttctgctcatcctgttgtggaccagggactatatttggctcttgtgggcttagaagaataaacaagaccaagttcctaccccagagcagatttctctctggaatggagagataagaccgtgtgcaggtccctggaatgtgctgtggtcatccgcggcaccggtaggatcagtgtctgttggtgctcactgttgtagctctgggcacctgctaattgtaagatgagtggatggcaagtacctttagaaggagagattactgctgcctgaagaggttaaggaaacttatgtggagaaagtgacctttgagctaaggatgaggatttggaaatttagcagtgagggaagacctacagtgtgcaaaaagtgggtaagtcagatcaggaaaggggctataggtggagaaaagccagtacaggaggccagtttggtgggagggaagggtccttgaaggggagaaatggttgacggagatggccgcccggccacccctactgggaagtgaggagcccctctgcctggccagccgccccgactgggagggaggtgggggggtcagccccctgcctggccagccaccccgtccgggaggtgaggggcgcctctgcccggccgcccctactgggaagtgaggagcccctctgcccggccaccaccccgtctgggaggtgtacccaacagctcattgagaacgggccatgatgacaatggcagttttgtggaatagaaagaggggaaaggtggggaaaagattgagaaatcggatggttgccgtgtctgtgtagaaagaggtagacatgggagacttttcattttgttctgtactaagaaaaattcttctgccttgggatcctgttgatctatgatcttacccccaaccctgtgctctctgaaacgtgctgtgtccactcagggttaaatggattaagggcggtgcaagatgtgctttgttaaacagacgcttgaaggcagcatgctcgttaagagtcatcaccactccctaatctcaagtacccagggacacaaacactgcggaaggccgcagggtcctctgcctaggaaaaccagagacctttgtttacttgtttatctgctgaccttccctccactattgtcctgtgaccctgccaaatccccctctgcgagaaacacccaagaatgatcaataaaaaaataaataaagaaagaaagaaagaaagaaaaaaaaaaaaaaagaaaggatacactggggctgattcctcgagggccttgaatgttgggcttagaagctgtaggattgttcagctctcaatgcagagccaggttagcttggtttttggattgttttttctaactctgaactggacaaagatggaaggtttttaatgcagggagtgatgtgaatgtagccgggcttcaggggagttcatctgctgtgtgggggatcgataagagagatgggtggcctggcgcggtggctcacgcctgtaatcccagcactttgggaggctgagatgggtggatcacctgagattaggagttccagaccagcctggccaacatggctgaatcctgtctctactaaaaatacaaaaaattagctgggtgtggttgtgggcacctgtaatcccagcaatttgggaggctgaggcaggagaatcacttgaacccagaggcggaagttgcagtgagctgagatcgcaccattgcactccagcctggacaacaagagcaaaactccgtctcaaaaaaaaaaaaaaaaagaaaaaaacatatagagcacaggctggggctgagagaccagtgctgagggagtgggagagggcgctgtgccaggcaagcaagaggtggctgtggagagggcagtgcggggatggagctgaccacgttggggagtcccagggtgggtgggaagaatgtaagtttggaaatgatagtatccaggtcagttgtcagggagagtggtggtgccagagatggactggggaacacagaaggaagcaggtaagagcctggccagggcagggaggggacatggtataggtagggaagggtgtcctgggctggctcacccagagaatttatggtgactttgcccagcctgtgctggttctggccaagctgtagttgagggctttgatacctgtcgtgggccacgttgtgaccaatttttctgtctaggagcatgtatacatatatacacatataaatttgtatgtgtgacaaaaccacctcactttaaatttatccccttttcctcccccttaaatctaccccttaaccatctttaactttgtagttcagtggtgttaagtattttcagattgttttgcaaaagatctctaaaactttttcatctttgaaattggaaacgaggctgagtgtggtggtttatgcctgtaaaccgagtactgtgggaggccgaagcgggaggattgcctgagtgtaagagtcctagaccagcttggaaaacatagcaagaccctatcattaaaaacaaaacaaaaaatacccaccaacttggtgggtcacggtggctcaggcctgtaatcccagcactttgggaggccgaggcaggagattgcttgaggcagtctagaccagcctgaagaacatgtgagatcctgtctctacaacaaaaaaatgaaaattagccaggcctggtggtgtgtgtctgtggtcccacctacttgggaggctgaggtggaaggatcacttgagcccatgaggttgaggatgcggggtgggctgtgtttgcaccactgcactctagcttgggtgaccaagagagaccctatctcaaaaaaaaaaaaaggatggaaaactgaaactaattaaacatgaattcactctcctcccaccctccagcccttggcagctatctttctactctgtttctgtgattttgactattttatttatttattttattttttcaagacagagtcttgctctgttgcccatgctgcagtgcaatggcatgatcttagctcactgcaacctctacttcccgggttcaagtgaatcttctgctgcagcctcccgagtagctgggatcacaggcgcctgccaccacgctgggctaatttttgtattagtagagacgaactttcaccatgttggccaggctggtctcaaactcctgacctcaggtgatccacctgcctcggcctcctgaagtgttggggttaaaggcatgagccactgctccctgcctgattttgactattttagatgcttcctgtgagtggaatcctgagtatttgccctgtctggctatttgacttagcatagtgtcctcagctttcatccatgctgtagcatgtgtcagaattctctcgactgagtaatatccattgtttatatgcatgacattttctttcttttttcttttgtttgagatggagtctcactcttgctctgttgccgaggctggagtgcagtggcatgatctcggctcactgcaacctccgcctcccaggttcaagcaattcttcctcatcctcccgagtagctgggattacaggcacccaccaccacacctggctaatttttgtatttttaatagagatggggtttcgccatattggccaggctggtctcgaacccctgacctcgtgatctgcccaccacggcctcccaaagtgctgggattacaggtgtgagccactgcgcctggcttgacattttctttatatattaattgatttgactgaggaaaactttatatataattaactacaaccatttgtagtacaattcagtagaaccaccagcacagccgggctataggacatttccattgtccccaagacattccttgcccccctttgctgttcatccctttccaccactggcctcagacaaccactttttgtccctatagcttagtttacattttctagaacttcatgtgcatggaatcatacggcatgtaccctcctgtgtctggcttctttcacacatcatagtgacactgagattcatgttatcgcgtgaattggtagttcatttcgggaggctattttgatagatactagcctgtcttctaactactcttgtttttgcccagacctccagcttctagtgctgaatcactgtcagctctggcctgagttcagtaatgacctccttatgtccgctcggctcccttccagcccctttcccaccctgtagcaggcaaagagaactttacaaagttctcttcatagaacgtttgactgtgaccacccactcttcaaacacatcagtggttttgcatgatagatggttgaactgatgctgcgaatggtctggcccctatggttccctccaaaatcatcttggatctgttttgcttcctccattttagctattctgcatttccttggaacctgtcccttagtgtccctgagtaggcagtcaccacgtacctctccatatctcccagcagggggtggctttacttttgttcctgtgagccttccattggcagctggctccctcccatgagatcaggggcagctcttttgctgcctgctgctgcagctgtagtgcctggcaccttgtacgtattcacttcatgacggaatggatgaacgaggctgttcttttagattgggctctgtcacgggcagccctgaggttttctgcacgtatgtgtgctgagcccctgtctttctggtgttggcaggacgagcagctgagggccctggtgaggcagtttggacagcaggactggaagttcctggccagccacttccctgtgagtacagtcctgctgtggccctccctcggggcaagggctctgggagaacagtgtgcctgggacagactttgccaaggaggggaaaagggagttccttactcagcccctgaaaacaaaaccaaataaaacagggcaaatggacctttgtaggatctctcttcccaagctggcattcagggtacactgctgtaaacatcttccagctcctcagcatgcctggtggtcttcaggctctgagacatttgcagcatgtggtgcatatttgcatttcttcctgtaagtcaggagtgaacaggtgttcggtttctcaacagtgagactgaaactgaggggaagtgatgctttcagcaggcttcatggtgaggcccctgcagggctggcaggtgctaccacattcgagtatttagagcctcctgatggtgagggggttcccctcaggacctccttctcaggccctcccacccctgacccacaggtgtctgggagggagggggtgtggcaggagctgccatatgtcttactgcctgggctgctcagaaagcatgtcaccagatcctttcctgccccatttcctcatctccccctcttctgtgtaatctgaactcttcagggaataaaaatgctctcctagaaaaaagcaggggtccctgacgtacaaggaattaaagacttgtgatggtggccccttgtgttcggttggtagggagcggcttcccacaggggaccgagtttgccctctcgtgtagcaaagggaaaccgcccatgttccggcatgtgggcttgcagtgagtggtggctgcatggaacaggacacacctacccaaggtgtgcctagtcccaggccataggcccctgagcctagtacttaaccaggcccccagcccgaggtcccagaagttctcacagattggtttgttcttctgttcttttcccagaaccgcactgaccagcaatgccagtacaggtggctgagagttttgaatccagaccttgtcaaggggccatggaccaaagaggaagaccaaaaagtaactgctgggacagtgccttgcacacagtgggtcttcacccaccagtgtacctggggactgtgagattgccttgtgttggggttgggggtgtcaagctgagcattgggtgtgagttgtctaccagccagtctggacactcttatgctgccctggctccagccctgagattccaagtttcagagtgtctccaggcttcctcactcatggtctgagggctattgggctgattactcggcttctcttgttccacccatggaggggagcagtagcagtgcagcgttgtcatgagaattaagcaggtgatgcttgtagggggcttgcaggttctgtacatttgctctcagcaaatggcagctgctgctatccctgatttaatgatgattgcaccctgtgaccttcacagggcacagatgccttcttttgatcgccacagcagtcctgtgaggtgggcagaagttgttagtcccattttatagatggagagagcaaggctcagagaggttggggatgtccccaacctagaagaggcaataagtgccatgactgcctggggctaccttgggagttccctcatctcttctcctcgataccagcccagaggatgccattccactgaggcaggcatggcttatgagaaagagggagatgaagggaactaggcattttttttttttttttttttgagacggagtcttgctttgtcgctcaggttagagtgcagtggcgcgatctcagctcactgcatcctccgcctcccgggttcaagcgattctcgtgtcttagcctcttgattagctgggattacaggcacgtgctaccacacctggctaatttttttgtatttttaatagagatggggtttcaccatgttggtcaggctggtcttgaactcctgacctcgtgatctacccgcctcagcctcccaaagtgctggaattacagacgtgagccaccgtgcctggcctggaactaggcgtttttaaattaatttttttttgagacgagtcttactctgttgcactggctggagagtgttggctaatttttttgattgattgaggcgggggttcgctctgtcacccaggctggggtacagtgacataatcacggctcattgcagcctcgacctcccaggcccaagcaatcctcccacctcagcttctaaagtagctggtgccacatgtgccaccatgtctggctaatctttttgaaaaatttttgtagagagagtatctcactatgctgcccaggctggttgaacttctgggctcaaatgatcctcccacgtcagcctctcaaagtgctgggattgtaggtatgagccaccattcctgttctttttttttttttccttgttaatttttttgagactgagtcttgctctgtcgtccaggctggagtgcaatggcgtgatcttggcttactgcaaccttcgcctcctgggttccagcaattctctgcctcagcctcctgaggagctgggattacaggcgcctgccaccacgcccggctaatttttgtatttttagtagagacagggtttcaccatgttggcctgactggtcttgaactcctgaccttgtgatctacccacctcagcctcccaaagtgctgggattacaagcgtgagccactgtgcccggcctttttttttttttttttaatttgtagagacagggtcttcctatgttttccaggctggtcttgaactacagggctcaagctatcttctcgccttggcctcccaaagttctgggattacagtcatgagccatggctggcacttcgccttaaaattaatttttaagtaactcggcgtggtggtggggtgcctgtagttgggaggctgagttgggaggattgcttgagcccaggagttcgaggttacagtgagctacgatcacaccactgtactccagtctgggtgacagagtgagaccctgtctcttaaaaaaaaaaaaacacaaaagaaaacacctgggcgtggtggctcacacctgtaatcccagcattttgggagcctggggtgggtggatcacctgatgtcaggagtttgagaccagcctgaccaacatggcgaaaccccgtctctactaaaaatgcaaagatgagctgggtgtggtaacccatacctgtaatcccagctacttgggaggctgaggcaggagaatcacctgaagtggggaggcggaggttgcagtgagccgagatggcgccattgtactccagcctgggcagcaggagcgaaactctgtctcaaaaaaaaaaaaaaaagaatgaaataaaatttatttatttatttatttttgagatggagtttcgctcttgttgcccaggctggagtgcagtggcatgatctcagctcattgcaacctcctcctcctagggacaagcgattttcctgcctcagcctccggagcagctgagattacaggtgcatgctaccacgcctggctgatttttgcatttttagtagagacggggttttgccatgttggtcaggctggtcttgaactcctgacctcaggtgatccacctgcctcgacctcccaaagtgcttggattacaggtgtgagccaccgggcctggcctgagaccttgtctcttaagaataaaataaaatttagtttgaaaatacttttttggctgggtgtggccaggaatttgagaacagcctggccaacatggtgaaaccctgtctaccaaaaaatacaaaaattagccaggtgtcttggtgtgcctgtaatcccagctactcaggaggctgaggcgggagaatcgcttgaacccaggagacggaggttgcagtgagctgagatcgccccactgcaccccagcctgggcgacagagtgagacactgtctcaaaaaaatggcggtggctcacgcctataatcccagcactttgggaggccaagtcgggcggatcacctgaggtcgggagttcaagaccagccttatcaacatggagaaaccccgtctctactaaaaatacaaaattagccgggcatggtggtgcatgcctgtaatctcagctacttgggaggctgaggcaggagaatcacttgaacccggaaggcggaggttgtggtgagccaagatcgtgccattgcactccagcctgggcaacaagagcaaaacttcgtctcaaaaaaaataaataaaaaataaaaagtgaaaacataaaatctttaaaaaaaaaaatcaaagtgatatgtggttgctataaaaatttaaaccatacagaagtgaagtcaaatatttcttcaccaaaatctttgccaaaagaagcatccactcttcccagtttcttgtggcctgtgtgcacatgagaacgcgtgtgtctgttgtgtaggtggggcctggcctggctcttgtggctgcgtatgttgtggtttgtgtcctgagctaggaagcctgactgagggcaggtggggactcaggtctggctaggtcagcccgcgatgcctgctaccatggctcagcctgtgccctcccaatttccatggaagtgctggagggtcttgtggcagcctggggcctggctggtgtgggaaagtctgtttcccacctttagtttggactccgtgtgtgttgttcctcctcatccctctgctcttttctacttagcttattgggttgagccctggagagggaagcaggactctggcgcctttgtttacccccacttgatctctactctagaaagggtctctggtattcttggcctagatttattccaggcaataaatgagagggatgcggtcagatcctcaggtaggccctgtgggctacacaaagtcatcctgggtggcatcccctgcagctcgctcagtgttgcctgaggggatgtggtaggtggcacctctcagggccatggcaaggctcaggtggatgtgaagggctatggtgggggcgagagaggggccggtgcaagtggctacccagagacttttctctaaggtcatcgagctggttaagaagtatggcacaaagcagtggacactgattgccaagcacctgaagggccggctggggaagcagtgccgtgaacgctggcacaaccacctcaaccctgaggtgaagaagtcttgctggaccgaggaggaggaccgcatcatctgcgaggcccacaaggtgctgggcaaccgctgggccgagatcgccaagatgttgccagggaggtaagctgtcttcttgggggttgggacaggttcccgggaggccaggcccgtgtttctgatggaggagggttcctgggtgggtattgtggtcctgtgctcttgttctgtaacacccagcctcggctccagggctcccagaggcatgcatagtcaggaggaagggtggttccccagggaaggccctgtcttctgtcagcttaaaagaacagatggtgataagggaggcctcagcaagaaatcgggaaccctggagtctagttctcatcctgttcccagctcactgtgtcttcttggttagcctcttctcttcgacttcagtttcttctaacacagaataggcttgagatgtgggatagatgggctttctttaagaagaaaatgatcaaaaatcaggtagtactataatctgctaaaaggtgttttttgtttttctttttcttaaaaggtttaataatgaaaaacatcagtctttgtcaccactctgttaaatgactctactaaaacagactcatctttttgagttctttatctctttaagtgatgtgccatttttcatattgatcctctgctatgggagattagctttcttaggctttcccactccccatatgtccctattgctccaataatgtatgatagttattaaaataataatgtttatggacgggcatggtggctcatgcctgtaatcctagcacgttgggtggctgaggtgggtggatcacttgaggtcaggagttcgagaccagcctggccaacacagtgaagcctcatctctactaaaaatacaaaaaattagcgggatgtgttggtgagcctgtaatcccagctacttgggaggctgaggcagaattgcttgaacccaggaggcagaggttgcagtgagccgagatcatatcactgcactccagcctgggcgacagagcgagactgtctccaaaaaaaaaaaaaaaaatttttttttcccctaaatactgaaagcattccatgatcttttctcctatttttcatctgttttgcttcattttctaggagacttcttatcttctctttttttgaaattattttccctaaaaattttactttctaagggctcctcccttttctggcactctttttttattttttatttattcttttttttgggagaccagagtctcgctctgtcatccaggctggagtgcagtggcgtgatccgggctcactgcaacctctgcctcccaggttgaaacgattctcctggttcagcctcccaagtagctgggactacaggtctgtgccaccatgcctggctaatttttgtatttttagtagagatggaatttcaccatgttggccaggctggtctcgaactcttgacctcctgcccacctcagcctcacaaagtgttgggattacaggcatgagccactatgcccagactctttaaaacagggttctcactctgtcacctaagctggagtgcaggggcataatcatggctcattgcagcttcaccctcctgaactcaagcaatccttctgcctcagccttccaaggacctgggactacaagctcatgccagcatacccagctagttttaaaattttttgtaggggcagggtctccctatgttgcccaggctggtcccaaagtgctgggattacaggcatgagccaccacacctggcctggcaccctattcttattttgtggtttcaatagcttacttctctgtcaatattatattttttttaagaccgaatttcgctcttatcacccaggctggagtgtagtggcatgatctcggctcactgcaacctctgcctcctgggttcaagtgattctcctgcctcagcctcctgagtagctgggattataggcgcccgccaccacacctgactaatttttgtatttttagtagagatggggttttgccatcttggccaggctagtcttgaactcctgacctcaggtgatctgcctgccttgggcctcccgaagtgctgagattacaggtgtgagccaccgcacctggccctaagctggatattgttcccctgttttccatcttatgaaaacttgtaaaaaatctcttactagtggctgtcttctacctgtttctctttgtccttgtgaatttttgccttgctttattttgaatccctttttttgtcatggcagtgtggtcctggcagggagagaaaatgccagatggtgtgttttccccaaagtctgaaatgatcccttttcaaagctcaaacctgaatgtgtcatctttctggggcttcccctgacacttgggttggaaactctggcttctttccccccatggcctgtttggctcacaggtgccaccagcctcaccttgatccactgtcacttgtgcttactcggtgttagctgctttgcctcctttcagtccctcgaaccctgagctcttctcagagctcctagtgctcctctgtcggcctgcagtgcactcccgcttgtgcctattgtgtagctaatgtgttctcatccttcagttctcagtgggggtgctatttcttcagagaagttttctctgttctcccagactgtggttggtctctggtgacctctgtgttgtgcccacacctgtctgcagagtagtgtgtaccccagttgtagctgaagataacattcatctcccctgctagatttaactgtcaatggcagccacttgtcttatttaccagatggatccccagtgcctacaataatgcctggcacacagtgggtgctttttatatgcgagcaaaagaaggagtctcactatagcttggggcaccccagactctggtcttggggagtgggagggctggggaggtgttttgggtcaggttccctggaagcggaacctgtgactcaagagtttcaggtacatgggatctcttggaaaggttctcacctgtgagggaaggagtggagaaaagaagggaaggggccaagcaagggatggggtcttggaaaatagagctttggcctgctataaggccaaggagtgtgtgtgttcacatgtatgcatgcgaggtatgtacatatgaggagggcgcatgtgtacatgggttggggaactcctggggcatcttcggttgtgccttccaagagctgttttttgtttttttttttttgtttgttttttgttttttgagacggagtcttgctctgtcgcccaggctggagtgcagtggcgtgacctcagctcactgcaacctccgcgtcccaggttcaagcgattctcctgcctcagcctcctgagtagctgggattacaggtatgcaccaccacgcctggctaatttttgtatttttggtagagacgggatttcaccatgttggccaggctggtgttgaactcctgaccttaggtgatctgcttccaagggctcttatgcagataaagtcatagtagaagccgtcggcagcatgcccggcagctgggggattggattcgctgtagggacagaggatctgggcaaagcaccaggagcaccccttaccctacacctttgcccagtgagcattgtgtccctgaaggcttagagtgcaaatgatccgaggatattctcttagactgggtgctcagttaagctgttactctctgttcacttttcaaggaaagagtattctgcttggcactccaaagaaggtggtgactactatgtgtcagcacagtacctttgtatttttagtagagatggggtttcactatgttggccaggctggtcttgaactcctgacctcaggtgatccacctgcctcagcctcccaaagtgctgggattacaggcgtgagccaccgcgcctgacctgccgcttgcttctcaccactatacttctatacacttttgtggtactatcccgtccttctgtattactctatgcctttattactacatgtttctctgctactctactctgtgctttatgctactgttctactgtagatgtgtctcctccctgaatcttcagtgagtgatggagtatgacgtagtcttctgaccttccagataaagaaaccaaggcttagggaggtgaacagttctgggccttctgccctctttggccacttatcagtctgtgggaggtgaacaggccttgcatctgaggtcagcgtgagactcagtggaaatgagcagacagtgttgcttatggcttctacacattcgaagtgggcagggaagggggtgagagttccaagcacatatcttcagttttataatttttaaaaaatttaaaattttttttttcatttttatttatttttgagatggagtctcactctgttgcccaggctgtagtgcagtggcgcaatctcggctcatcacaacctccacctcccgggtttaagcgattctcatgcctcagactcccaagtagctgggattacaggtgcctggcatcacgcccagcacctcccaaagtgccaggattacaggcgtgagccactgttcctggtcttatatatacattttttttttttttgaggtggaattttacttttgttcccaggctggagtgcaatggcatcatcttggctaaccacaacctctacctcctgggttcaagcgattctccttcctcagactcccaagtagctgggattacaggcatgtgccaccatgcctggctaattttgtatttttagtagagacagggtttctctgtgttggtcaggctggtctcgaactcccgatctcaggtgatctgctcgcctaggccgcccagagtgctgggatcacaggtgtggtgagccaccgcactcggcaatttttttttttttttaattaaaaaaaattttgttttttacctgaacctgacagtagctggtgccattttataatttttgccatagcctgaatgattcagttgcttatttcacagagcttcgtggaaatgctctgtaaattattagggctagagacttgtgagacttcatcttggaactgaaagagaccttagagttcatctagtggaagattcatttacaggagcaggaacttggcttagggaggttagtgatgtgcctgatggcaccccacccacagagctggggttcaaaggccccctgctgccccctgcaggacagacaatgctgtgaagaatcactggaactctaccatcaaaaggaaggtggacacaggaggcttcttgagcgagtccaaagactgcaagcccccagtgtacttgctgctggagctcgaggacaaggacggcctccagagtgcccagcccacggaaggccaggtgagacagctgctcagcctttggcttggtttgatttcacattcatctgacaccatctcattgaacaccttgtccacagctattggtcagtttctgccacagagtctaaaagtgggctctgtgcttctggggccttgtgagacttctgcacataactggcacttgtctgcctgcagatgaaggatagcagagcaagctgattatataaaactgtgaattagttaaggagatcctcagcctccatctctccttgctggtggccaccttcttacctgttgctcattttaattttttaaaactgaaagcatgtttgcaataaaaaaatcagaggtggctgggtgcgttggttcacacctgtaatcccagcaagttgagaggctgaagcgggcggattgctcaagcccaggagttggaggccagttcaggcaacatggtgaaaccttgtctctatctttttaattaaaaaaaattaaaaaatgtattgagttgtaatttacgtactctaataaacagttttgagttatgacaaagcatacagccatgtaaccactgtcacagtcaaggtatacaacagtcccatcaccccagaattccctcgtgctccttttcttagccttttttcggcccttagctccttgcactgtgatctgttttctgtctctataattttgacttttctagaaattaacaattaaaatcctatagtattacatttgcaggctgttttttttgagacagagttttgctctgatgcccaggctggagttgcagggtgtgatcttggctcactgtaacctctgcctcctgggatcaagcgatctcatgcctcagcaacctgagtagctgagattacaggcatgcaccaccacgcctgactaatttttgcatttttagtagagatggggtttcaccacgttggccaggctgggtttgaattcctagcctgaagagatccgcctgccttggcctcccaaagtgttgggattacagatgtgagccaccatgtctggcactacatttgcagtttttatttatttattttttgagatggagtctctgtcgctcaggctggagtgcagttatatgatagctcactgcaacctccgcctcccaggttaaagcgattctgctaactcagcatcccgagtagctgggattacaggtgcacaccaccatgcctggctaatttttgtattcttagagatgggggtctcaccatgttggtcaaactggtctcaaactcctgacttcaaatgatccacccacctgagcctcccaaagtgctggcattacagacgtgagccagcatgccccagctacatttgcagttttaaaaatgaaatcagtatatacttatgttaacatccactgtcctatataccagagcaaagtttttatttatattttttagctatatctctaaaggttatttttcaaaataaaaatttgggtagggcgtggtggctaacatctgtaatcccagcactttgggaggccaaggcttttggatctcttgagcccaggagtttaagaccagcttgggcaacatggtgaaaccccatttctataaaaaggaaaattagctgtgtgtgattttgtgcacctgtagtcccagctacttgggaggctgaggtggaaggattatttgagcctgggaggtggaagttgcagtgagttgagatcccgccactgcactccagcttttatttataaataaaataaaaatttgaaggccgggcacggtggctcacgcctgtaattgcagcattttgggaggccgaggcgggtggatcacgaggacaggagattgagaccatcctggctaacacggtgaaaccccgtctctactaaaagtacaaaaaattagctgggcgtggtggcgggtgcctgtagtcccagctacccaggaggctgaggcaggagaatggcgtgaacccgggaggcagagcttgcagtgagccgagatcacgccactgcactccagcctgggtgacagagtgagactctgtcacaaaaaaataaaactaaagaaaattaaataaataaataaaaatttgaagcaagcatgacaaaaaatagatttgatgatgccggctgtgtggtaggtaacaattgtcctttgttattttctaatcttttctgtcatggtgtgaactatttaataattttaaaaaatctttttccctcttcttactgggtagagataacttgttgacagttacaattcttccacaatgccctgctagagcgatatattatgtttttgcctctatttcttgaattttcaattttagagaatatctctcgattgcccaatatgaatgcacctatggggtaactttcaaagggcagagaaatgtatcaaatgaaaagtaaaacgacttctttttctggtttcaactccctgtgcatctcttaaccggaggagtctacttctgacaatttcttgtacatctaagtagtatgtgtttgatcttttacttctgattgaagaaaaggtctccgttccacaaagagaaacagcgggcatcagccgactcatagaagactttcagcataggacagagtgaacagatctctagtctcttaaaaactctactgtgctgaaagccagttattgacttggcttttgtcccctgacactttgagtgtctggagtgctggctgtgctgggctgggaccaagccccagaccatgaccctgagcacaggaggtcaatttttttttttttttggagacagagtcttgctcttgcccaggctggagtgcagtggtgccatctctgcttgctgcaacctccacctcccaagttcaagtggttctcctgcctcagcctcctgagtagctgggaaactgggattataggcattcgccaccatcctggcaaatttttgtatttttagtagagatggggttttgccattttggccaggctggtcttgaactcctgacctcaggtgatccacctgcctcagcctctcaaagtgctaggattgcaggcatgagccaccatgccgggcctgtgttgatttcagccttacccgtgtctctccaatgtggtctttctggtgtgctatttatttaactagtttcttactgatgtagataagggtattactggttttttgttattagagataaaactcttaacagtcacccttgtggccaaatgactgcttctttgtgcagttatttcttgagaaattcctagagatggacaaatatatttggtggtggggggaacccttttggctgagtatggtggctcattcctgtaatcccagcactttgtgaggccaagttgggaggattccttgaggccaggagtttgtgaccagtctgggcaacatagggagactgtctttacaaaaaaaaaaaaaagctggtgcggtggcacacacctgtagttccaactactttggagcctggggcaggaagttcacttgagcccagtatttcaacagagtgagactctgtctttgaaaaagcaaacaggccaggcgtcatggcttacacctgtaatctcagcactttgggaggctgaggtgggcgtggtgacacaggcttgtaatcccagctactcgggaggctgaggcacgataattgagaatccacttgaactggcgtggcggaggttgcagtgagccgagttcgcactgctgcactccagccttgggtgacagcaagactctgtcttaaaaagaaaagaaaaaaaacctcttaatacattttgttagattgctgccagaagaattttgcatgttaattcgtgtatgggaccactcccaacttctccactcactggtcagtgcttgctattataaaattgtttcctctgcttcagaagtaatgcgtgatcattgcaaaaacttaacaactttatagaattgggcaatgcagaaggttgagcctgctcatctcaacttttttttttttttgagacggagttttgctcttgttgcccaggctggagtgcagtggtatgatcttggctcaccgcaacctccgcctcccgggttcaagcgattctcctgcctcagcctgccgagtagctgggattacaagcatgtgccaccatgcctggctaattggggtttctccatgttggtcaggctggtctcaaactcctgacctcaggtgatctgcccaccttggcctcccaaaatactgggattacaggcgtgagccaccacaccaggcttaaaattagacgatgtcttactcttttacaactttctttttctatttaacatatcgttccatgttgttatgtgtattcagatctccaacattcctgaatttgccgtatcttatttaaccattatattgtcaaacatctgttactatttccatcaatgctataatgatcatcattgttcagtttctttgtacatttgctgaactgtgtggttgatttttttgtttttagatggggtctcactctgttgccaggctggagtgcagtggtgtgaccttggctcactgcaacctccgcctcccgggttgaagtgattctcctgcctcagcctcctgagtagctgggattacaggcatgcagcaccatgcccagctaatttttgtatttttagtagagatggggtttcaccatgttggccaggatggtctcgatttcttgacctcgtgatctccccgcctcagtctcccaaagtgctgggattacaggcgtgagccactgcgcccggccggttgattttatagatgtggaatgattgggtaaaatagtgtggacatttgaagttttcataagcattgccgaattgctgccaaagggattgtactgtttaatcctgctataggtggtatataggactgcttgtttccagccttattgtcaataccggctatggttatatgaaaaaaaatctttgccagttttaatgagcaacaaatgcattatcatgttcttattttgattgaattactttggagttgatcttttttttttcagctttattaaaatataattgacaaataaattgcatatattgaccaggggcggtggctcatgcctgtattcccagcactttgggaggctgaagtgggcggatcacttgaggctaggagtttgaggccagcctggccaatacggtgaaaccccatctctactaaaaatataaaaaattaaccgggtgtggtggtgcacgcctgtagtcccagctgctcaggaggctgaggcatgagaatcacctgaacctgggaggtggaggttgcagtgagctgagagtgtgcctctgcacgccagcctgggtaacagcaagactctgtctcaaaaaacaacaagggctgggcgcaatggctcacgcctgtaatcccagcactttgggaggctgaggcaggcggatcacgaggtcaggagatggagaccatcctggctagcatggtgaaaccccatctctactaaaaatacaaaaaagaacccaaaaaattaaccggtcatggtggcgggcacctgtagtcccagctactagggaggctgaggcaggagaatggcgtgaacctgggaggtggagcttgcagtgagccgagatcgcgccactgcatttcagcctgggcaacagagtgagactccatctcaaaaaaaaaaaaaaaaaattgcgtgtatttatggtgtgcaatgtgatgttttgattcattgttttggttttcatttcttttactattaatgagggtgagtaacaaattaccccttaatttgttaatttgttatttggcttggttgtctttttttttttttttttttatcttgttactggtttgtacattttatttgtatattaaggatgctactcctttatcatgtagtaactattttttcccagtttggtagctttttttctttattttataaaggtataatttacatacaataaaattcactttttgtttgttcgtttgttttatagagatggggtttgcccaggctggtctcgaactcctgggctcaagggatctgtctgccttggcctcccaaagtgttgggattacaggtgtgagccaccacgccccgcatattttttttttttttttttttttttttttttttttttttttttttgagacagagtctcgttctgtagcccaggctggagtgcagtggcgcagtctcggctcactgcaagctccatcttccgggttcacaccattctcctgcctcagcctctcaagtagctggaactacaggcgcctgccaccacacctggctaattttttgtatttttagtagagatggggtttcaccgtgttagccaggatggtctcgatcctcctgaccttgtgatccgcccgtctcggcctcccaatgtgctgggattacaggcgtgattttttttttttttttttttttaaatgagcagggtcttgctctgtaccccagactgtagtgcagtggcgtgatcatagctcactgcaaccttgaactcatgaactcaaggggtcctcttgcctgagcttttcagagttctgggattacaggtgtgagccgccacacccagccccctcccccctcccttttttttttattagagtcttgttgtgttgcccaggctggagtgcagtggtgtgatcatagcccattgcaaccttgaattcaggaactcaagggacccaattgcctcagcctcccaaagtgctagagttacaggcataagccactgtacctggtctttttattttttaatgtttattaagcattaaaaatttattttttaatttttttgagacagagttttgctcttgttacctaggctgtagtgcaatggtgcgatctcagctcactgcaacctctgcctcccaggttcaagcaattctcctgcctcagcctcccgagtagctaggattacaggtgcctgccaccacacctggctaattttgttttgttttgtttttagtagagacagggtttcaccatgttggccaggctgatctcgaactcttgacctcaggtgatccaccagcctcgacctcccaaagtgttgggattacaggcgtgagcctctgcacccaacctctgtgtattacttctttcatctgagccatttgagagttagttatgtagcatagattcctaagaataaggccatttgcttacataaccacaataaagttatattcaatccagggaatttaagcctaattcaggatctttatctacagtttatattccatttttccctgtccatgatgcagtctaagaccagacattgcatttagttgtcctatccctttagtcagcctttcttagtgtcatgatgttgacattttggaagtatatggtatggctaattattctgtagaatgtttctctatttgggttcatcacagtttccttcttagattcaggttgtgtggtttagctggaaactactatatagtctatatctcagcgaaatgcaaatggtgtattcttgtgtcttacagggaagtcttctgaccaactggccctccgtccctcctaccataaaggaggaggaaaacagtgaggaggaacttgcagcagccaccacatcgaaggaacaggagcccatcggtacagatctggacgcagtgcgaacaccagagcccttggaggaattcccgaagcgtgaggaccaggaaggctccccaccagaaacgagcctgccttacaagtgggtggtggaggcagctaacctcctcatccctgctgtgggttctagcctctctgaagccctggacttgatcgagtcggtatgttggtcacaacacttcacagtgagcacagaacacccccagcaggaagtgcttctctctcaggcccacatccttttgctcattccatcgccctgctaacagttactgacttgatgctgaatgcctagccctgacccaagggctggggacaccagggttgtcagcatgcagtccctatccttggggagctcccggtgtgtgcagcaggagtttgtggtggcatctgacctctatgtatggcacagggcggggtgggaaggctgcccagaggaggtggcactgaactgagtcctaaaggttgactggcaggtgacagcacaggacagcgtggtatttgtggcatcacacatggttgggtctccctgaagaggagcccaggaaatgccaagtcttggtgctggtcttggagtggtgagtgggttctggttactcagggtggggcagccattgagcccgtgttgtggttactgtgttggctgtgtggttgtgtcctttgaggagggcttcttggtgtgacaccccggctcctggctgcatcggccaggcctgctgtgtagagcgggttttgggaggtgaaagaccagaggcctggtcactagggtggggagttcagtatgggggtccgtgttcgcctttccacccaggtgtctcccatcctagaacatctaactgccagggtctgagcttaacatacagtctgcgtggtatcctgtgaggtgtgtcatttctgttttttaggtgaaactgaggctcagagaggtcaagtagtgtacccaaggttgcacagcaagtatacttggtggtcttgactgccatgctatgctcctgctactatcgcttggcaggcacagctcgcttgtattgagcacccactgattgccggagccagtgcttaatgagtaattacagtacctaacattggagtgcttgccgcgtgccaggcccatcacttgctacctaatgtgtaggctcttagttggtctttaacagcctgtgaggtgggtagtggactcatcaacagtgagagcaccccacgctcagagaggttaggagacttggccaggttcacacagccggtgacctccaggaacaggagttaaaccttgctgtccggctcagagctcaggctctttccacaatgaccttcagcgcctgttgggggagttactgcgtgtgtggaaatcccatcttccctcctctgctccgtccacttcagtggtccttgtaggatgtacttctggtctaccagacactgtcggtgctgggtcctccctgaattggggtgtgggcctgaggtcggtcctgccccccagctggcctccacccttaggagtgaactaccccagggaaccagaactcggctttagtgtctgggtccactcagaagccagaacccaaagaccaaagtggaagcctctgtgtccagaagccttttggtttgtgttgtgatttattgggtaaaggagggaaaacctgtagtgactcacgggcttgttctagaagctgagtgagtaactttgggaagaccgaatccccttagctcagcttccttggtatgaaagggaaagtaatgcttccctagcagaattgtggggattggaaataacttttgtgagctgccccaaggaggcatcaatgatgagtgacatcccattcactgctctatatttcgttctataaaaatatctgcaggctgggtactgtggttcatgtctgtaatcccagcactttgggaggctgaggtgagaggatcacgtgagcccaggaatttgagaccagcctgggtaacacagtgaaacacagtctctataaaaaatattttaaaaaattagctgaagccgggtgcagtggctcacacctgtcatcccagcacttttggaggccaaggtggtcagatcacctgaggtcaggagttcgagaccagcctggccaatatgggtgtggtggcacacgcctgtagtcccagctactcaggaggctgaggcaggagaattgcttgaacccggaaggcggaggttgcagtgagccgaggttgcaccactgcactacagcctgggcgacagagcaagtctctgtctcaaaaaaaagtaaaaaataaaaaattagccgagaatggtggtacatgtctgtagtcccaactactcgggaggctgaggcgggaggatcacttgaacccaggagttcaagcctgcagtgagctgtgattgtgctactgtactccagcgtaggcaacagagtgaaaccctgtctctttaaagaaaagaagaatctatgaaaatatagatgtatagtcatagaaaactttgaggaaatgcatgaaatattaatgattggtcctgggctgtgggatcatacttgacacttaaatatttcccgtaatgaatgagtcctcttgtattaagagcatagtaattgcaattcctaacctccctccctggacaggaccctgatgcttggtgtgacctgagtaaatttgacctccctgaggaaccatctgcagaggacagtatcaacaacagcctagtgcagctgcaagcgtcacatcagcagcaagtcctgccaccccgccagccttccgccctggtgcccagtgtgaccgagtaccgcctggatggccacaccatctcagacctgagccggagcagccggggcgagctgatccccatctcccccagcactgaagtcgggggctctggcattggcacaccgccctctgtgctcaagcggcagaggaagaggcgtgtggctctgtcccctgtcactgagaatagcaccagtctgtccttcctggattcctgtaacagcctcacgcccaagagcacacctgttaagaccctgcccttctcgccctcccaggtgcgtggaccccactctggctgcttattgggtcggtacagacacctagtgttcagtgctggggcaagggtgagcaaaacgagacctggctctgccctcatgcagcttatgctctggtaggaagaccaggtaactaaaaaagactcagaaaatgtgataatcaggatgaaagagaaggcttatggtgctgcatatgtgtatctagtctgggcaagtccaggaagactgccaggaggagaaggaggatgctggtaactgggtaatgaaggagaggaagagaactgtcgtgtttgttcagtccacgtatggaacctatttcacagcagacttaccagcactggggagcaaagatgaagatgatgggttgtctccagcactggctggccctgcctggtcctgggaagacctgggatagccagtgctggggatgggcttgtaatgaattaaccagaatagagtgtgggaagtgccatgtgatagcaattgcgaagtcactgagaactcactgttctgggtgttgcccctgggtgctctgttagtaacacacagagcctcgggagccgggatgggtgccagggtctctctgagatagaggtcatggggggcacctggccttcctgcagagaggtgtctgggctgggtctccttgagcaccttgaccaaaggcacagaaaaggaaggacagagtggatgtgtggagtggtggggggtggcgcagggccttggtgggcctaggtataacttagggctttggctctcattaggtttgttcttcctgtgaggctgtgggagagagcgaggccctgaggtggcctggtgcaggaggccaccctgtcatcacgggtcaggatggctagtggcattttgagagagaccctgtgtcggtttgctccggctgcttaacagagtaccacaggctcggtggatttgacaagaaattcagcagtgttggtttctactgaggcctctctccttggcttgtagatgctggcggctcctgtgtcttcacgtggtcacctgtgtcctaatctattattttttcttgtaaaacctcttattttataatgttataaggacacccgttattggattagggcccactctaatgactttattttttgagagtcgctctgttgcccaggctggaggctggaggctggagtgcagtggcatgatcacagctcactgcaatctccaccttccaggttcaaggaattttcctgcctcaggctcctgagcagctgagattataggcatgagccaccatgcccggctattttttttgtatttttagtagagacagggtttctccaggttggccagactggtctcgaactcttgacctcaagtgatccacctgcctcggcctcccaaagtgctgggattacaggcgtgagccaccgcgcctggcctaactaaccactttaaaggccctatctccaagtattaatacagtcccattctgaggtgctgagagttgggacttcaggatgtaaatttgggggagacacaggtcagcctgtaacatgccgcaagtgagggctgctggctggagaaggaaggcagcgggtccctcagctactatttgggaagctcaggatgatggagcgtggtcgctctactccagagaccccatttagggtggtgaccctgagggttgcagatggctctctattatagcaccttcagggcagggagggaagagagcggggtgcttcaaaggatggatgttggcttagatctagatttcattctcacttctagcactcagtgcaagactcaaaacctctctaagcgttggttttcttatctgtaaaagggggatagtaatagtgcctatgtctcaggatttgtggtaactaattgaaattatttgtgtgaagtgcttagcactggcaagagaaggtgccctctaaatgataaccccaccgccaccagcacactacaactgtcacatgccttttgccttcacaggtcagttcagagctagttttatttcttctgagaaggagccactctcccacagttggcttcctgtgccttaactgcgtcgtcagcactcgagtagagatggcaaaagctaggattagggtgacggaagcccagaggtctgtgtgaacctgcttggtgggctcctggcatcgatctgtcccagtccttgttctcgggtgtctgatgggtcaagaggggacctcagtatcagagcagacgttttgggggagaggctcaaggatctctccccatgatcccctgaggtctcagggatactcatgcaggtcatcattttgtcttgttccctctctcttctttggcagtttctgaacttctggaacaaacaggacacattggagctggagagcccctcgctgacatccaccccagtgtgcagccagaaggtggtggtcaccacaccactgcaccgggacaagacacccctgcaccagaaacatgctgcgtgagtgctgcagtgcccccaaccttcgccgtcctctccctcagcaacaccagaccatgggccttgggaccactggtggaacagtggggagggggcacccttggaataacactgaagactgttttaagaaagccctctcctttctggccaccacgatttatcatttttatcgatatagttttgggctccacctttgcttttcctcatttgtattttttaatttgatagtttccttttttgtgatcctcctgcctcagcctcctgagtagctgggactccaggtgcatgccaccatgctcagctaattaaaaaaatatttatttatttatttatttatttatttatttatttatttattttgagatggagtcttgctctgttgcccaggctggagtgcaatggcgcgatcttggctcactgcaagctccgcctcccaggttcatgccattctcctgcctcagcctcccgagtagctaggactacaggcatccgccaccgcgctcagctaattttttgtatttttagtagagacaggatttcaccgtattagccaggatggtgtcgatctcctgacctcgtgatcctcctgcctcagcctcccaaaatgctgggattacaggcgtgagccaccacacccggctaaaatttttttaagaggtgaggtcttgctactttatctgggctggtcttgaactggccttaaagtgatcttcctgccacagcctcccaaaacgctgggattacaggcgtgagctactgcacctggccctcatttgataattttctgtctcaggaatggagagtccaaattagcctgaaaaacataatctcttccgcttcctaaggtttcaggtgcaaattcgttgtgtttgagcagccttatgtgcagggcgaaagtgcccatccctctatcaagagtggagactgcattcctgtcctctgagcttacggagcatgacattttctgtctggaagcctgtacaggttgctcgccagcctgcttttacaatggaagtgcttttacaataagtttacttccttgggtcatcatgattctaaattccaggtagagagagttgcttaactattcctctgcttgatacatttgctggaggaggaaatcgctattttgtgattcagaaatcagctcaggaattttagccctgatagtgatacataatttcgggaaaagatttgtgaatcccttagtcagaaatcagtctccaaagtccggctcagtggctcacacttgtaatcccagcgcttgggaggccaaggtgggaggatcacttgagactaggggtttaagaccagtctgggcaatatagggagaccctgtctgtacacaaaaaaaaaaaaagttttttttttttttgagatggagtcttgctttatcacccaggctggagtgcagtggtgcaatctcggctcactgcaacctccgcctcccgggttcaagcagttctcctgcctcagcctcctgagtagctgggattacaggcacgcgccaccacacccagctaatttttgtatttttagtagaaacgaggtttcaccgtgttggtcaggctggtctcaaactcctgaccttgtgatccactcgcctcggcttcccaaagtgctgggattatatgtgtgagccactgctcccagccaaaaaaaatttttttaattagctgggcgtggccgtgtgtgcctgtagtcccagctactcgggaggctgaagtgggaggattgcttgagcccaggagtttgaagctgcagtgagctatgattggctactgcactccagcctaggtgacaaagcgtgactctctttctagttttttttttttttaaaaaaaaaagagaaaaaagaaatcagtctctaaagagttgatctaaagcataacttagataggtttcgtgagaaatgattgtccgttcaaaccagaatcttggacttcgcatctaagcccttaaacagagatgctgtcactacaaaaggcattgatacttctctctctccctttctttcttatccatgtggcctcatttgctgcctccttccaattccttttttccataggaagaagcatctccagtgctcttcattcctctttagatccatatttccatctggttccttctgaaggccatcctttaaccatgtagtgtgggcttgctggtgatgagttctaatttttatatttttttgctaatttttctatttttttgtagagatggggtttcgccatattggccaggctggtctcgaactcctgactcaaatggcctgcctcggcctcccaaagtgctgggattacaggcgtgagctgtaatccagctgttattcctttgtagagagtctctttagttatccctcaaatttgacaggctgtatggtggtgtggtatttctctatttttttcccccccggctttcatatcagactaaagattcaaaccttgagctgaggaagtgtttatttctttagtttttctttccctgtctgccccttctcctaccttaggaattccttcatatataggctggattggtctctgtgtctttttcgtcttcatacgcctcttcaccatcttaagccatttccttaatcttcggagaacatgatgggattgttttctgattcaccagtttggttgtctgtggtttccaacttgctgaattctctgatttacagagctgcattttttatctccaagcaatcttttgaattcccttttcaagtcagcctccctgcctccctgagttttctttttgagacagtcttgctctgtccccaaggttgaatacagtggtgtgatcatggcccactgcaacttctacctcccaggatcaagtgatcctcccacctcagccttctaactagctgagaacacaggtgtgcaccaccatgcttggctaatttttttgtttttttgagagacagggtctcactgtgttgcccaggctagtcttgaactctgggactcaagcaatccttccgcctcagcctcctaaagtgctggcattacaggggtgagccacaaggcccggcctctccctgagttttctaatgtgtgtatatacactcttttttttcttttttccgagacaaggtctctcttagtcacccgggttggagtgcagtggtgcaatcatggctcactgcagccttgaattctgggctcaagtggtcctcctaccatagcctctggagtagttgggactacaagcaccaccatggctggctgatttttttatttttagtagtgatggagtctgtgttacccagactgttctttaactcctggcctcaagtgatcctctcctgtcagcctaacactaatcccagagtgttaggattacaggcgtgaaccactgcctttggccatgtgtgtgctcttagtccttgttgatgccacgaattagagaggttctggaattttctcatgttcctcagaaactccatgtcccatggagatgcttgagtggctcagattcacctctgtgaattgtggtttgaactgtaagatgtgtacatttgacttgtgcttatctgtcttcactcttccttacagagggggatctctgtgtgtcccagatgggggataacaagggtttgggaagagactgtggatccctgcctaatctctaggtcctgaggaaggaagaaaagaatggtctgcatttgttctagttttttatctccccatggagtggctggccagctgcgggaagtggaggcggcgaggccccaggctgctgtttctaggagttggcctcatcacccaggtccctggctacctggggtgtttctctcatcctctgagtgccctggttatgccatgagagtcagccatggtggtatctccaggtgactaaggtcacataccagcacacaagggttcgtgtttgtggaacctggtagcttccttcagagctgacatttgcccacagccagcctggcccagccccataccaccagccctggcgctctggggcgtgaggtgccttttctgcccccctgctctagggcaggtggaaatcacccatggtgggtctacatctgatagaagcatcttatagttctgcttctggaccagaccatcctgggtttttctctgttctgctgaagggttccctccacgtgtccatcacctcggtgaactcttgggagacctgggaagatgctggcctcacctctcgcccctcctttccctcattgtgctgccaccatccttctcacacaggctctccagggagagctgggcaggatgggatcttcctgggttcccaccttgctccgtgccccctctcactgttcctgaagtgtggccacggactgccttgttttctggaaagtcccaagtctggaccatgactgagcagcattctcggctatctgccacctgtctggggctcctggcccctcttagactcccctctcccttctgtttcccccgagcccctgacttggacctgcagggtggggagagggatgggacgagaacctgtgctggggccaaaggtcgcactgggggaaggtggagccagggcagcagagtgcctggcgtcggcccctatcctgtcactagttcccccgttctggcccctggcaggtttgtaaccccagatcagaagtactccatggacaacactccccacacgccaaccccgttcaagaacgccctggagaagtacggacccctgaagcccctggtacgtggtgtggtcgctgccgtggatctctgcacagtgggatcccttcggttcatccaaccatgttcagtccacaggacccttccctctgaggtctcatttgattctttctcctgagaagatgcagagatcctgataatataaatggggaagctgaggctgctctttgtcacttcctccgactgctcctgagcacctgagtttgcaagcacgcgccggctggtgctagagacatggtggtatcccgtgacactcagcctcaggatgggggagactgatgtgaaatacaaataacttaaacactttcaggcaaagataagcactgggcctagttcagagaagtggcaaattgctactctggcctgtctctgaccaactcccagttctctacagagcacgggaaagcccctcggggacgtctttcctgcagtgtgcaggctgcccttctcccctgctcttcccagttgatgggatggttgtgttttctctatgaaaaaaggagttggcaccttgggctttctgaaacacacaggtgttttagaaatcagtggagggtgagagaaaggcatggttgtggaggcactggactgtgaacaaggtctgcagcgggtccccctgctgtctctctccactgcatggagcctcctatgaagcccaaggtggctgggggctgaggctcccttgggcctgccatggaactgattctgagtcaagcagactttccacggaccatgctacatgagccgaggtgaggcactagttagtgctcctttcctgttgcagtggagatttggctcctctgtactaaaatatctgcatgctctccaaacaggtgtgagggcaaatcacatgaccttggcagctgtaattaaagtttgtgggggcttttcggatgacttatgaggagtggctgtgattcgcacctttcactcttagtagcactcgccctcccctgttctctgttgcctgaagctggagaggtccttggaaccccgaggcctgagaaagggaaatgggtttgagagcccccattagtgtggaacaaagggttgagtgagcctgggctttgagctgtcggggtcctaattcagcagctgtgtgactgtgtgccaggctgttgatctctgagcttctgtttctacctgcttaaaatgacggttactgcacagggctgtgtgagggttacagtgcgtctctgggctgctcccagccatggcaggcccctgggaatcaaggtcatcagctgcttgtccaaggcagcagttagtggttgtgaatggtgcgtgtgagatctgcatcctggcgtcaggcctccttcctgccttacccaggacagcccagttgcagctgggttggtcccacagtcccacacacacacagcccgagtgtggtgcctcacgtgggctgccccgtgcctacccacagccacagaccccgcacctggaggaggacttgaaggaggtgctgcgttctgaggctggcatcgaactcatcatcgaggacgacatcaggcccgagaagcagaagaggaagcctggggtgagtagggtaggggtgggagagcctgggcagggggaattggagccgtggcatgggggaggcgtctggggacaggttgtagaaagtgaggcgctggggagaatgggggcgtagcatatcccctttgccccctttcgcacggtggttgttgaggaaactgacaagataaggacagtgtctctgggaccctcctctgctctgctttgaaggattcacttacttatccagcattgtgttcggaccctgctcaagttgggctgggctggatgtggtggatggagcagcaattacgacccagactggatctccccttagtgttcagggggcagagacagatgctagacagacacaccatgactgaattcacagggtaccaagggccgcagaaagggaggttccaaaggaatcttttgggtggaggcgaggcggtcgggatgagccagccaggccaggcagtgcctggctgagtgtcaagctgcatgagctgggggtgggggagtgggttcaggtgaggtggagtctgcaggggctcctgggcaggggggcagggaagggactgtcccaagcctccgttctatgccagcctccctcccactgcgtcgttagctttcatgacagtgcgcgatcccttcgagtctcctagtgctcctttttcccagactgctctcctcaagggagagctgggaacggtgggatgtacagggtgttaggtaaggaggggaggtgggcggtcagcctgggcgggacttgcccgagctggcaccccatgtgcacgtggagagaacttggcctctggcctccagggtcctccctggcctctccttggtggggatggttgtgagccatggcagcccctgctgagtgcactgttgggtagagtggggatgtgactctcagagccgctccctggtatcggagcaggccctggacctgcttctgtgaggtgcacggttaggaatggggcgttccttgattgtattaggcattgtagaggggcttgtcctgaggggtttgtgttcccatattactggcctgtgggtgctattttaggtgttactggggtgattctctgctgggcctgtttgaggggctgtgtctggtccattcggggtgagaacaggtcacttcgtggtggaggttcatgctgtgttcctgctcactgtcgcagcacctggcaggatagggtctaccttgggtacagagtctaatggggccatggggcctaactttcccagccaccccattcttctgacagcagattcccactagctgggccttgctccaagtctgcactgcagcagggcctggttttgtgaccatccatggccatgaccatccaggtgctgaccatggggaatccagacactcaccctaacccccttctatctgccaacccctagctgcggcggagccccatcaagaaagtccggaagtctctggctcttgacattgtggatgaggatgtgaagctgatgatgtccacactgcccaagtctctatccttggtaaggcttctgctccttggaactgttgagttttggagaggaccctcaaggtggagttagtgtagtgactctccaactgggcttctggaaccctgggctctgcagggaggggctatcagggagggtgggtccgggcacccactcatggcttcagtcagcagctctgcttgtctctcacagaaggttttgtttggcagagttgcgcggctaggacatgttttaaaaacatgcatctgggtctcctgcgctctcccagagagggtcagtgatgtgtctttttttttctttttttttttttgaattggaatttcgctcttgttgcccaggctggagtgcaatggtgccatctcggctcactgcaacctccgtctcccgagttcaagttgttctcctgcctcagcctcccaagtagctgggattacaggcatgcatcaccacgcccggctaattttgtatctttagtagagacggggtttctccatgttggtcaggctggtctcgaactccccacctcaggtgatctgcctgcctcggcctcccagagtgctgggattacaggcgtgagtcaccgtgcccagcctagtaatgtgtcttaaggtatagccaggcacttgggcacattagtcctgggatgggtgctatacagcccccaggccagtggacttgctgtgccgggtgctacagtgaggtcgacctcagaaagggggttgttgcctgtgcagagcctgggtccccagaagccagggtgtgctgctgatccctctctgctcacaatggggtgagttggcttgccctggctcagagtggggaggcggtgagaggcatggcggcgtcatgaacaaaggttaagggttgcctgatcttccaagtagactgctgccctcacggtccttgcagagaaaccttgtcctggctaggggtctctgacaggctggggacctgcagccaggttactgcaaagaaaaaaacatcaccgcagggagtgaagagcacagattgagtcaggtgggcctgggtttgagttatgacaccatcactgctctctgggatctttcaggttccctgagccccagttaaaagcctataaaaggggtgccaagcctaagtcaggagggcacagtgccaagcagagcagagagactggaagggcgtgggaggggctttgtgcaactccgctgtgcttggggttgaagctgcgtctttatgatgcttgtggatgtttctggtcccaggaaaactaggaacagccttggctcctcctgaggctttatgtgacaaagccaacgttattgagtatgttattactggataatgctcagtgatactccacatttattgattatgttattatggcctgggggctgcacggcacccatcccagggctgatgtgcccccacgtacttgactgtgcctccagacacaccactgaatcaggctctgaaacgcacacacgtttctttacttgattacttgattttttttttttaagtaagaaagttctttagaacaagattaagttctttgcttaatttttttttgagacggagtctggctctgtctcccaggctggaatgcagtggtgcaatctcggctcactgcaagctccacctcctcccaggttcgcaccattcttctgcctcagcctcccaagtagctgggacaacaggcgcccaccaccacacccagctaatttttgtgtttttagtagagacggggtttcaccctgttgaccaggatggtctcgatctcttgacctcgtgatccgcctgcctcggcctcccaaagtgctgggattacaggcgtgagccaccgctcctggccctttgcttaatcttttaagtataaagtaagcttaagctcatgtaaactccctatctgaaagcagaaactgaggcttggaaaagtgtgtatcctctttcaggtctcagcagccaggtggtggtgctggggtgggattgcgggtttttttcttccctctcacagcttctcgcaaaatggtgactccttgacttggttttggtttcagccgacaactgccccttcaaactcttccagcctcaccctgtcaggtatcaaagaagacaacagcttgctcaaccagggcttcttgcaggccaagcccgagaaggcagcagtggcccagaagccccgaagccacttcacgacacctgcccctgtgagtgctgtggccatctctgggggtcctgcagtgcccgccttcttagctcagggctgagtgctggccatccctgggggtcctgcagtgcccgccttcttagctcagggcctttgcataggctgttcctctgcctgggtgcttttcctgctacttcccgtggctgcatttgcttaacttactcttctgatttcagtctcaatgctgcttccttaggggtaagccttctctgaccctacattctgtagagatacccccattctgccattctctcttttgtggcctgggtttcacttgtaactaagtcattatccctgtatttggtttgcttagtacatgtctgtcctcaagcaggggctggcttcaggctgctgacccgtctcactgctccttctcacccgcctcctggctgtggcttctcctcgaggctggtgctgcacggggcgggcagtgcatggccatgtctccttgtccagcgtcctacttacagttgaggaagcccacagccaggaagtgacttgtccagggtcacagggaatgtggagagagaataagaaggctctggcttctaggggagggaggcttataactctacccttccctggccaggatcaccagggtctgttgggaacacatagtccctgcctggatggtaaccctcttgcctcctcccagatgtccagtgcctggaagacggtggcctgcggggggaccagggaccagcttttcatgcaggagaaagcccggcagctcctgggccgcctgaagcccagccacacatctcggaccctcatcttgtcctgaggtgttgagggtgtcacgagcccattctcatgtttacaggggttgtgggggcagagggggtctgtgaatctgagagtcattcaggtgacctcctgcagggagccttctgccaccagcccctccccagactctcaggtggaggcaacagggccatgtgctgccctgttgccgagcccagctgtgggcggctcctggtgctaacaacaaagttccacttccaggtctgcctggttccctccccaaggccacagggagctccgtcagcttctcccaagcccacgtcaggcctggcctcatctcagaccctgcttaggatgggggatgtggccaggggtgctcctgtgctcaccctctcttggtgcatttttttggaagaataaaattgcctctctctttgtgctggtctggactctgcctctctactgggccctgctcatggttccctggtgacctaggggcctcttctgggatatagggacctgaatgctcatcctcagaggccagccttatcggcacagcccaggcctgagcccttgaccctgtttccacagaggggcacaatgagatgagagcaatttctctcgtctctgcacccagtgggcatctctgcaaagctctgagtattaatagccatggggttgggcgggggtgggcagagactgggggcggaggaggacgatgggttggtgcagtagggccttgcctggcccttgccttgggtggctcacctgcccattaacaagcccctgcctcaagctgagcgtggcccccaggtcagaccagtaagcaaggaagaggggtgaaggcagctgggcagaaccctctagccccattggccaaggctgagcaggaggccaggatgggccagagcctctgcccttgtggccctaaatccctagggttgtggctacagagcacagtgcttggcaggtggttgggaagagtcactggggattgaagaggggaagatgccaagtctgagaatgtctaaatgaggaattgatgttttcagcagcaggcttcatgggacaggcacatgaacatccctgtgggcagaggttgagcagacttggggcaggtcctcacctggggcaagagatgcggccaactctagagggatggggactgagttaattagggtgccagagttcagatgtgtctggcctcagacacacccctttctccctgctgagctcccgcctacagtccccctactcctgtccattcacatgcaggcatgccgtgcttggtcctggcagtgtcccagttcttgatctaaagccgaggaggggcgggggctctgtgcttcccaccctgcaccccgcaccccgcagcccatgtggctgggctgcatgcacctgcaggttccatggatgaaccacacctaactcacgccctgagcttttgtgatttgtcagcatggagcctatcccctccccaacttcttccccaaggtctgtcactggccgctccctacagtccttggtcacccaaggtggatgacctgtgccccacggtgaggatggaggctgcattaccttgtctcctatagctcacaccaagactcggtggaacaactttgtcaaactcaaatgcagtgcgctgcaggctaatgatgaaaattcctgggccctctgagtcaggtacctggggtggagcctgcaaaaagggatttttaacaaaccaccagtgggttattcacatgcagggcgttgactggctacactctgagctgacgcctgtgaggctccaggggcttgtaccccatgccctctcttgcctgaggtcttgctcattcccagggactgccctcaggccctttcctgtcctggagggaggaggctgtaaagaacagagtggctgcaggtaacagcaagcttaacataccatcctcactgagctctgtgtgctgtgggcttgttctttggttcatgcattaaataaatactaggccgggtatggtggctcacgcctgtaatcccaacactttgggaggccgaggaggccaaattgcttgagtctaggagtttgagataagcttgggcagcatcatgaaaccctctgtctactaaaaaaaaaatagaaaaaattagctgggcatggtggcatgtgcctttagtcccagctcctcgagaggctgaggtgggagaatcacctgagcccaggaggtcgaggctgcagtgagctgagatcattccactgcactccagcctgggcaaccagagggagacactgtctcaaaaacaaaaacaaaaccacatttattgagggaccctccaaccctacccccacatgtctggcatagttgtagtgctgaagatatagcagtaaaggatagaaaccaggccaggtgtggtggctcatgcctgtaatttagtactttaggaggctgaggtgggaggatcacttgagcccaggagtttgagaccagcctgggcaacatggtgaaaccccatctctacaaaaaattttaaaaacttagcatgatagcatgatggctcatgcctgtagtcccagctactcaggaagctgaggtgggaggatctcttgagctgtggttgtgcctctctactccggcctgagtgacaaagcaagaccctatctcaaaagacaaaaaccaaaaaactaccttattctcatggagcttaaattcttttttttttttttttttttgagatggagtcttgctctgttgcccaggctggagtgcagtggtgcgatcttggctcattgcatgcttcgcttcctgggttcacaccattctcctgcctcagcctcccgagtagctgggactacaggcacccaccaccatgcccggctaattttttttttgcatttttagtagagacaaggtttcaccgtgttagccaggatggtctcgatctcctgaccttgtgatccgcgtgcctcagccttcgaaagtgctggaattacaggcgtgagccactgcgcccggccatggagcttaaattctaaaaagcagacagatataaaccaaccaattgatataaaatgtgccagagggaactttgaagtaaagcagggggtaccgtgaggccagtcatctgctcagagaaagtggggaggagtcagatttgacagctcctggccatcatggggacagggagagcccacatgggaaggcagattggttgccactcaggaggtgctgggggcccagctgctgtttgatcaggagtttggggaacttggtcatgaggattgatccaggcctgatgtttcccaggctagtgtggcaagcaagaaagagttagccagatagcgctgaggggcagagggcctgagttcaggatggtagtacaggagtgggggtgctgcggtcagcctgggagagggacaggcaggagggaaagatgaggcttagttaagatggcagagggaggctgggcgtggtggctcatgtctgtaatcccagcactttgggaggccgaggcaggcagatcatctgaggtcgggagtttgagaccagcctgaccaacatggaaaaactccgtctctactaaaaatacaaaattagccgggcatggtggcgcatgcctgtaatcccagctactttggaggctgaggcagaagaatcgcttgaacccaggaggcggaggttgcggtgagccaagatcgcaccattgcacttactctagcctgggcaacaagagcaaaactatcttggaaaaaaaaaatggcagagggtgaatctgccattctggcaagatccagatgattgtctggcatttggtgaccagcatggcctggaggtgagaggctcacagatatagaggctgtggtagattgttccagcaatggctccctagggatcactgctccctgtagctattcccatgagtgggtcatgtggttgactttgcccctgagggactctgggagaatctgctgaaggaggtgagaattctagctgttctggttgagactccagacgtgagtaaggccaccctaaaccatccagcctcacctgatctggcccagactggaggaactgcccatctgatcacaaagtcatgagaataataaatcagtattgctttaagccctaagattgaggatggtttgttacacagcagaagctgactgatagagatgctggcatgaggaactgggacatgtgagtacttaaggtggtccaggataaagataaaatgtccttctcagagcaaggcagggactggggcaggagcagttttgataggccaggagtagtttgggagtcttaattagccactttttcagcagaccctggtgtatcactgaggaaaatcaacactgagccatgggctcatcagggttggggagaaacaggagacctagggttccaggaactttgcgggaaatgaatggggtgaaggattctggagttcaaagccactgtgaccatacctgtgtcttgttccccagagctgaaggcagtggggagagatatggctcatggcatctggcagactctcccaggtcctcctgcagtcctgggtagagctcttactttggatcagacagacttgggtgtaaacccagcttagctcttgggagctgtgtgtctcttcaatgcactgagccttggctccttggctgtaaaatagggagaatccttcaacttcagacttgttgaagggattgggaagaatatggcacatacttggtgctcagataacatgggctcttagtatgttattacttagtatgtttttacatgtttctcatttctttgttacacacaatataccctgcaaaggagaaattagtgcccacgtttcaggtgagtgctgggagggaagatggtagacagtggttgagtcaggacttgagcccaatcctggacagcaagtctggcattttagtatgccccattccatgccatcctctgtgtcatactgttatgggctctttgggttgtcacttttctggccagaaacatctgtggctgatggcacctttacccgagttcttgtcctgtgtccaggaggtacgcagacaggtggaaggtgaacatgattaagagaaactttattgagtgttacaacagttcacaggagaccctcagtgagtaacttctgtctgtaggcagatggtctgcagtgttaactctcagcggagaggaggccctggaggatgttgctcctctctgctactgtttgtcccattatctccagttaccagcagagacagtagctcctctctgcagctggtcatccctttctctgtcctctctcctgctctggctgagcccgggacttttatagacctcagagggggtgaagtgcatgctgattgctctgtgggtggccatgggcagcagggagggagcaccacaagtccccactccggccctcaggactggcagctggctcccagccttcaggccctccctggcctgaaggaggggccttactggggactcgcccccttctgcccaggaatctgactcccgctgccattcatggcccctggggtgcagccccaaccctgctcccagattggagcaggtgcctggagaggagatagtccaggcagcgggagcagacacccctgagcctgcagggatggggagcattccccgcctgagaatgcaggctgcagagatacccaggtcctgcacttgggagggccgctgcagctgcacccagggagcttccgccccgccaacttggaaggggtggggatcctgcttgtccccagctcctgcctagtttgtggagcaggaggcccaggtctgcagccgccagtcgggtggctgcagctgcacccagacaggcagatcttgcctgctcccagccccgctaagagcacgggaaggcttggatccacagctgcagtttgggcagctgcagccctgtccagtagggcagggttcctgcctgctctgtggagctggaggcctgggttggcagctgagatttgggcagctgcagcggcccctggggagcaccagatccatggagtgtgcagctcccgctgcgcttccctgccacaggtgcctccctgctgcagcccatgtgatggcagcagccaatgacaatacctgtcagccagggtaggagtatggtgccatagaagaaaaccgtaagcgttagatagaggttcagttaaaatctttccatcggagtgcaatattcatacagaagagtgcatgaatcccacgtggctgtggatatgttttcacaaagtgaacagactcgcataaccagcacccagatcaaacaacagaacaagagcagcactggaaaccccctctccacccacgaagggtaaccgccatcctaacatcaaacaccagctttgctttgcctttttattttcgttaaatattatgtcaacagaatttcacattatgtgagattcatccaagtagatctgggtagttatcatttgttcattctcatgaccattttgttttattttctattttattttctatattttattttattttatacatggtcttattctgtcatctaggctgaagtgtagtgatatgattttctcactgcagccttgaaatcctgggctcaagggatcctcccacctcaggcgtcccgaataactgagactgcaggtgcaccaccacgctcggctaatttttttaaatgtttttatagagacatggtctcactatgttgcccaggctggtcttgaactcatgggctcaagtgatcctcctgcctcagcctcccaaagtggggctgggatgaattagaggcatgagccaccacacctggccaatttaattttaattgacaaataattgtatatgtttatggggtatgatgtgatgttttgatatgtttatacatacacagtagaatgattaaaccaagctaattcacatatctatcacctcacgtgctttttttgtgtgttgagaccatttaaagtctactcttctcaattttgaaatttacaatattggtttttcgttgtgtgacttccacaatttacccattatctcaaaggatgtgtggattgcttccagactgactattacacatagtgctgttagcacctctgcctcgccaccccacagtctgggaagtaagaagcacctctccctggctgccacaccatctgggaagtgaggagcagctttgcccagctgctgtgccaccctccaagtgtgaagtggtagccttgtgtgtgatctgtctgccctctccacgtctgcattttcgaaattaaagtttacttttaaattaaaaaaaaatagtgctgttatgcacatgtcatcctcatgttttggtgaactgtcatgcacatctggtttatacatatctaggagtggaactgctggggatggattcaattaggccacttgccatgcactaactttgtgaaccaaggcacattatttaggttttttttttttttttttttgagacggagttctgctctattgcccaggctggggtgcagtggtgcaatctcggctcactacaacctctgcctcctgggttcaagtgattctcttgcctcagcctcccgaggagctgggattacaggcacacaccaccatgcccagataatttttttgtatttttagtagagactgggtttcgccatgttggccttgaactcctgaccttaagtgatctgcccaccttggcctcctcaagtgctggaattacaggtgtgagccaccacacccggctgtcatttagcttttctgaaactcacttttcatatctgtatattggagataaaaatacttgctcctcagttttgtggcctggatttaatggaattatttcagcaaggcacctgacctgaatatagttcctctctcttcttcctctgccagccagagcaccctctgccccaagacacagcttttccaccgcactctctttgccaggaaccctcagcatgaacctgcaaagcttgcctgttgcccagggttggtggggctgcctttccccactgcctggtggccagctgccttttgggagcttggaggatacctacagaatgctccaggctgccactacatagtgacagacgtcagctctatcttgctctgtcttgacagagcccctgtgggtagcgcttccactaggctcactcccttatggcccaattcagggagtttcaggaagagtaagttttcctggtcctgttggcctatggtttatagacatatattctccacatcactttttccccctatttcctgtatgtcagttctctagttcatgcacttcattaatcactgccatccagaactttttatccccccaagaagtctttgtttataatacttcgtgtaagcagttgaaggggccagctgggtggcaaagttatgattacttaaaaaaaaaaaaaaaaagcagtgagcctaggcaacatagtgagaccccatctctacaaaaaaatagaactagccagttatggtggtgcacgcctgtggtcccagctagttgttaggctttgacgagaggattgcttgagccttagaggttgaggctacagtgagctatgattgcgccactgcacaccagcctgggcgacagagcgaggactctgtctcaacaaaaaaacaaaaaaaaaacttaacagttaagatttcctcctgaaaaactttcaaaggacttaagtcttctacctgctgtttaaaaaaatatagtttaatttttgaccagataacatattcatatatattcccatgtaaaagattctaaagagtcaatagtaaagaagggctctctcttgtcttccctggaggcagacaatatcagtttctagtgaagaggcaagcaaatttttctattaggcaacaggttgaaaaatttcaggctttgtggacagatctccattctagagtatccttaaagagaaattttatgcaaaaacaagcacatacatattcatgtcttctcccgcaactctccccaaatggtggcatactgtatagactgctctggacttgtttttgttttttcttttctttttccttttttttttttgagacaaagtctcgctctgtcacccaggctggattgcaatggcgtgatctcggctaactgcagcctctgctcccgggttcaagctattctcctgcctcagcctcttgagtagctgggattacaggtgcccaccacacgcccggctaaattttgtatttttagtagagatggggttttgccatgttggccaggctggcctcgaactccacacctcaggtgattggcccgcctccggctcccaaagtgctgggattacaggcatgagccaccgggcccggcctggacttggtttttatcagttaaactgggggttggcaaaccatggcccaccagtcaagtccagcctgccacctgtggctgtaaggcattttattggaacctctgttcatttgtttacatattatatgtggctgctctcgtgttgcagtggcagggccgagtagttgcaacacagactgtgtggctgacaaaggctaagatatttgccatctggccttttacagaaacagtttgctgacctctgagctcaacagtgtgtctcaacctttctatatcagcacagaaagagcttcctcactttttttaaggcggcataatattttgttgtatggctgcagtataacttatttttaatcaggcccttttaatggatatttaggtcatttttgacttttttttttgttgcttaagacaggatctcactatgttgcccaggctgaactcaagcgatcctctcgcctcagctcccagagtaacaggctacagctgtgattcaacacacctggctcatttctaactcttttgctgctgcaaataatgctgcagtgaataagctagtacttagctcattttccacatgtgtgattatatttacagaatgaagcctggaagtggaattgctcaatcaaagcctgtatgcattgataatgtttatagctattgtcaaattgccctctgtggaggttgtaccaactgacattctcaccaatgttatgaaagtgcccattttgccctacctttgccagcagagtattttaagccttttgatatttatcaatctgccaggttaaaaaaagaggtagcccagggtagtttactttgcatgtcttttattctgatgcattgcacgttcttccatgcattgatgaggcgtgtgctccttcctcagctggcagtttactgtcctggtctgaggatcttctggggactggtctctcttgctgactctttcgtgtcattttcacaaacaaccttttgaggaaaaaaagtcttaaggacaaacacatgctggcaattagcgccatcgacattccagatatcggggctgggaaggcagggtgagacctgctgggtgtcatcgttctgctctgaactaggaggactgactttcagagggttctcggtgtcctcttcttccacagcgctcctgttgacacaaacagcctcatgttcctccagatttttgatggggaccacgtggcaggcgttgtatttgcaggtggccatctttttggctttcttggggttctttctcctgcacgatgccaggtggtactggaatctgctgagtgggattcggtggtgaggatcataagggcaaatttcaaaggcttctggctccatgagaaattcttgaagcagggtatctcactgctagagtctaacggaaatgcttcttgtggagaagcccttttgtaagaaggatggagttgtcctctgcccagttttggcccttgggattctgtaggtgacggtcttaacttgtggtctgttctctaggactgtgagtggtggattagaagagagatgaggagctgccaaaagcagctacacagagaacagagttagcaaatggcacccgagacagaactatagcagatgcaagagccaaaaacccacagccgcttgactcacggatatactatgatgtcaagctgcagtcaccggtggtcacaatgggcagcctaagtcatcaggaagaggctattgtgcactgcttgggaggggtggatggctttgggaatgctgccatctaaaattgctcatggatgtatgttgtgacttaagtcttttaactgtacgtatttgttttttgtttttgtttttgttttatttgagacagagtctcgctctgttgccaggctggagtacagtggtgcgatcttggcccactgcaatctccgcctcccaggttcaagtgattctcctgcctcaggctcccgagtagctgggattacaggcacctgccatcatgcccggctaattttttgtatttttagtagagacgggtttcaccatgttggccaggctggtcttgaactcctgacctcaggtgatccacccgcctcagccccccaaagtgctgggatgataggtgtgagcccctgcgctttgccagggctggtttttggatgtgattctcagggccgtctttctttacccttctgctctgctgaggcccacagcagcctagtctccttgggtgtgggggaagggtttaaatctattcatatatcgcagaaggtgaagccttttggtgttcagcttaacatgggaaacatttcctataaaacgccccatcttaggtcgaccctgccgttgtccctcacagaactggaccaaagtctgaatggacgcaattgacacatatctcagggtgttagtggttttggtcctctgacattctatttacatgtctggtgttaggtaggatttcttctaaaaattggcctggagctccttcccaccccccaccctgttaaattgtttctcaagatctgagtgacagtagagaaataccatattcctgaataggaagactcaaaatcataaatgaatattctctgtaaactaaattacataaattacatagtcatcctaaattgatacataaatataatgcaattccaaataatttttgtagctttatgtgctgatatctgatagagcaagtctctgcttgttattagttttccccccaaaagccttgactatcttcaaggatttgttattctagatcatgtgtcaacaaactatgggcccatgattcaaatccagatggctatctgcttttgtaaataaagttttattgaagcacagccacacccatttgtttatatattgtccattggctgcttttgagctagatttgagtagttgcaacagaatccagatgacctagaaacctctaatgttttctgtctggcccattatagaaaaagctcacccatcctattcttggtggtggttaaggaagctgactgtattcaaattctacctcctgccacttaccagccatgtgaccttggggaaggtgtgtgtgtgagtgtgtgtgtgtgtatgtgtgtgtgtgtgtttcctggtatttactaagctctattgatggtgtcttttcaggtaggctttgtagttttctttctattttttgcacgttaaaaaaaaattaatctatgatgctttatggttttttctttttcttttttttttgtcattgtaaatgacactttttccatctctccacatcctagctatggtgttcagccttttttgagaattgaagtgattggctttgtctacattgttacataattgcaactgatcatacatgtgggatgtcttgttactatcatatgacatgcagacaatttagcaacatgacactcactgatgtcatagtaagaaattgtaatgggaacccaggtatagacaaaagattagacaaaggattctaaaaaaaggcatctttcataactacaccatttattctgggtgtgccagtcaggataggcaaggttaggctgcaataacgtacagtgccaaaacttcagtagcttaaaacaacgaaggcttatgagtcactttcaagtctaaagcaggtttctgggttggggaggggtattggggatctgctccttgtggttaatggagccaggctgatggagcctccatagcaacacttgcttccttctagaagaaggaagaggatgtggggagtcatgcgcgagcttccaccaggaaatgataaacatcacttccgctactgtttcatggttcaaagtaagtcctacctaacttcaaagagcaaggaggtacggtctttccacatgcccagaaggaggagaataggaactttgggaagtcctgagggcttccccagtctgcccttctcgtcaccagcattcatttctcttttctccacacacacggagcatattcttccccatggaagaaaacccaaagtcctagctcagagtgggggatcaatggcttactcagtgctctcctggggcttcttgagatcttgagatctggctcttaccccagaccagtggaattctagtgcctcaaaccaagctggctcctatgaggagtatgaggccaagaagttgtgttccctgtaccccaacccactcaccctagggatagctcctggtttgctctgctgagtgtccttggtaaactgtaccttccatatcatgcatgtaacacagagcccattttcttcaagcctacagcccactattaaaggaaatatggtcgggtgcagtggctcactcctataatcccagcactttgggaggctgaggtgggcggattgcttgagcccagcagttcgagaccagcctgggcaacatggcaaaaccgtatctctacaaaaaatacaaaaattagcctgctgtggtggtgcgtgcctctagttccagctactcgggaggatgaggtgggaggatcgcttgggaagttgaggctgcagtgagcctaaattgtgttactgcactccagcctgggcagcagagtgagaccctgtctcaaaaaatatattaaaataatttttttttgagacggagtctcgcactgtcgcccgggctggagttccgtggtgcgatctccgctcactgcaagctctgcctcctgggttcacgccattctcctgcctcagcctcccgagtagctgagactacaggcgcctgccaccacgcccggctaattttttgtatttttagtagagatggggtttcaccgtgttagccaggatggtctccatctcctgaccttgtggtccgcccacctcggcctcccaaagtgctgggattacaagcgtgagctaccatgcctggcctaaaataatattttttaaaaggaactatagtgttgtccttactgggagttaacagggagttcagcatctgctcttccacacccccaagcctggtgcagtgtctgccaatgatgctgatagcaatcttctttttttctttttgggatacagtccctctctgtcacccaggctggagtgcagtggcaagatttagtctcactccatctcaaactcctgagctcaagtgatcctcccacctcagcttccggattgctgggacttacaggggccagccatgacactcggctgatttttttatttgttgtagagatatagtctctctatgttgctcaggctagtcttgaactcctgtgctcaagtgatcctcccactttggcctcccaaaggtctgggaattacaggcgtgagccaccatgcccggctgacagtgactttttaatccctagtgccatagtctttttcatgcttccgaccagaggtggcccaggctggagtcttcaggcttctgtaattctggttgtctttgatcgtttgtggtttattgtccttgaaaaattatttgcgagggtttccaaagcctaggttacatgtgcctggctgagagaggcttttaaattctgcatatggagatcacaatgaaagcactgtatccgtcattgaaatccacataatgaggagtaagacattgctgttgcaggtttctttgtgaccacgcacctattagtgtggcaggctgagattcagtccattatggagagagggaaggctggggttgtttgtgcttcttctttttttttttgagatggagtctcactctgttgcccgggctggagtgcagtggtgtgatctcggcttactgcaacctctgcctcccgggttcaagcaattctcctgtctcagcctcctgagtagctgggattacaggtgcccgccactatgccctgctaattttttgtatttttagtagagatggggtttcaccatgttggccagtctggtctcgaactcctgacctcgtgattcgcctgcctcggtctcccaaagtgctgggattacaggcgtgagccaccgcgcccggctgtttgtgcttctaatggacatcttgaatggtcctcaagcctgcagcctcctcctggcacctgctctgagcctgggacctgagaggttgctcaccatggcaacccaagaggagctagggatgcacacacatctgtctgtgtgaaacttttcaaccctgtctgtgcatgtgtgaccagcgctgcaaataagatcggacctgctttcctctcactcccctccctgctgatcttcatcctgagagatgctgccaacagatggtaacacaggcatggagaggaggtcacagagtgtgcagaaacagtgttttctgaaaatgagaaatggcatgtcctggttagctgagtcagcaattatcattatggggtgggatgcagccatcggaggattagtcatcatgaatctgaagtctccaggcgaggagagagtctgacgtcatgcaggccagcttctctcccagggccggcatgccccccagagcatccctggaggatggtcagacagcgatggggagctcactacctctccagacagttcaattgttaggttgcacaccgagctgaccgcctcctcataccctgtagcagttagtgtcaacactgtgccctctgccccaggcacctcctgcaggttaaaggagatcctaagcatgctaaactcaagctgtgtgtatgtggcgttagtatgggtggccactccatttctggctccttgagtctccctgccatgtccaggagacaggtgtggacagcataggtagcccccatgggcttttgggctctggctcagggcttctccatgctgaccacctctgtgggccaccccttgcccaagggcttctctggtctcagccgtctgggcacctgccaactcctttgactcaaggaccttatttagaaaactctcttcatgtagtgacaatgagtgtagcaccatgtagcatttctcaaactataatgtggccaggaatcgcttgggttctggttaaaatgcctgactgggtgacgtttggttgtctttgtcgggttccatgtcacagctatgctagatttgtaaactgaatcagagcacattctcttttttgttttctggatggcttaaacagcctacaaacattctttgaaagtctgagagaacttgtctgctaaactctctgacccacaccctgttgggaaatagtcctctgtcagttttaaagttgattccctggttttttacttctcttggcaattctcatttttctagaaaagtgtgctgttatggactgaattgcatccctctcaaattcatatgttgaagcctgtgacccccaaatatctgagacaggtctcagtcgatttagaaagttccttttgccaaaattaaggatgcccccgtgacacagcctcaggaggtcctgacgacatgtgcccaaggtggtcggggctcagcttggttttatacattttagggagacatgagacatcaatcagtatatgtaagatgtacattaattccatccagaaaggcgggacaactggaaacaaaggcaggacaacaacaaaggtagggagggggcttccaggtcataggcagataaaagacaaacagttgcattcttctgcatttcggattagtctttccaaaggaagcaatcagataggcatttatctcagtgagcagagggaagactttgaatagaatgagaggcagatttgccctgaccagttcccagcttgacttttccctttagcttagtgattttggggtcccaagatttatttttcctttcacaagccttaaccctcaatgtgactgattttggagatagggccttgaaggatgcaattaagcttaaatgaggtcataaggatgaggccctgatctgataggactggtgtccctaggagacgaggaggagacactagagctctctctactcctgcacagaggaaaggccaggtgtgcacagagcaaaaaaggctgatatcagcaagccaagaagaaaggccttaccttgccctgctggcaccttgatcttggacttgcagcctccagaactgtgagaaagaaatttctgttgtttaagccacccagtctgtagtatttccttagggcagcccgagctgaggaagacacgtgttctccactgaactctcccagctgactagcacactgcatgcatttaatactcttctaatttgaaacctctcctctgtgtctttgattacatttccttgacttctctactgtgtttctgtgttctctctcgctcacttgcttcctacttcctccccctgcccaccccacaacctttttttttgagtcggagtcttgctctgtcacccaggctggagtgcagtggtgcgatctcggctcactgcaacctccacttcctggattcaagcaattctcccatctcagcctctcgagtagctgggattacaggcgcctgccaccacgcctggctgacttttgtatttttagtacacatggggtttcgccatgttggccaggctggtttcaaagtcctgacctcaggtgatccacctgcctcggcctcccaaagtgctggcattacaagcatgagccaccgcgcctggccgtgtgacccctccctttattgggcttccacaaggctgggtgtcctacagctgtttacaagaaaccaagtctttgatttatcagttctatggatttttatgttttctatttcattagtttttatctgtatttctgcttctctccctgggtttatcgtgttgcttattttctagctccttaagttggatgcttcatttgccttcagtcttccttgttgaataacagaaacatttgcagctatggggcgtacttcggtttcattccctaagtatggctacgtggagttccaattgtcatgacgttctgaatggcccataactgcagttttgttcctttctttgattcaagttatttaggcataaatttccaagtgatttcatttttttgttgttgttgtctatccttttgtttttaatttctgtttttattgcacggtggatagataatgtggcctgagaaaacgatggcttgttagtgcctgtgaggtgttcttggtggcctaaaatgtcatcagttttggtcacttccttacagatgtttgaattaaatgtcttccctgtttatacctatttattaaatgatgcttgtttttccacgctggcattgcttggaatgtgagtcctacaagctgctctggggattgtcacactgtaccttctcctggggaatctcagtggacatcagcacagatccaagaaggcctaaggaaaagccaaccatgaacctttgcttcactcagtgtctcccaggtgcagccttttctctttagcacctgttgctacctctaccagctagtttcctgtggaactagttgagaaaactctgttttaaggttttctcgtatttcttggggagtaactatttgttaagggtcatcagtactcatttctcaggtataacctcactctgcctcaccaaggctagagtgcagtggtgcaatctcggctcactacagcctctgcctcccgggttcaagcgattctccttcctcaccctcccgagtaactgggtttacaggtgcccaccaccatacccagctaatttttgtatttttagtagagatggggtttcaccatgttggccaggctggtctcgaactcctgacctcaggtgatccacctgccttggcctcccaaagtgctgggattccaagcatgacactgtgcctggccaaactcttcctttttttttgagacagagtcttgccctgtcgcccgggctggagtgcaatggcttgatctcagctcactgcaacctctgcctcccgggttcaagtgattcacctgcctcagcttcccgagtacctgagattacaggcatgcaccatcatgcccagctaattttttgtatcattagtagagatggggtttcaccatgttagccaggctggtctcaaactcctgaccttgtgatctgcccgctttggcttcccaaagtgctgggattacaggcataagccaccgtgcccggccaacttcctcctttttttaaaaaattagagacgggggtcttgcttagtcacctaggttagagtgcagtggtgcaaccgtatctcactgtagcctggaactcctgggctcaaccaatcctcctgccaccacacctggctaagattttaaaatttgttttagagacaaggtctcacatgttgcccaggctagtcttgaactcttggcttctgccttagcctcttgagtagctgggattacaggcatgagccacagtgcccagttgacctcttccttttcatctctgggcctatctgtgagtgctgagctgcttctctgctggagtggagtgtgtccgtgtggcttctgtctgatgctgaggctgtctcagttcaggctggattctctgtccttttgctcttggagacttggttatcgagggacccaaccaaggagtgaagctgtgtagtgactttactgatgcgcccaagggtttttctctttgttgtagcagcccaaagttagctggacctcaggaacaacccacacctcattccaacatcagcgcaggagggcgtgagatgtggccacagcctgtggcaccatgggatgggccagccctcctgccccttcagcaggggcaacatcagcgctgagctttagtcctcagtgatacctggtggcatttgcttctctgccacctgctgctttgagcttttcagttttgtggagttctactggtattatgctagagttcttccagaagtagaccctaagatgagatttcagatataagtagttcattcgggaagtgcaggtaaggctgtggagaaagagtaaggaagatacatttatagatgtactcacataccaatatttaaaactaataagagtcaaaaattataacaattttttgtattttcttttcttttctttttttctttttttttttttgagacagagttctactcttgttgcccaggttggagtgcaatggcgtgatctcggctcactgcaacctccacctcccaggttccagcgattctcctgcctcagcctcccgagtagttgggattacaggcatgtgccaccacacctggctacttttttgtatttttagtagagacggggtttctccatgttggtcaggctggtctcaaactcccaacctcaggtgatccgatcccctcggcctcccaaagtgttgggattacaggcgtgagccactgcacccagcctttttttgtattttctaaagttttaatgggcatatttttctgtaacaagaaaaatcaagcaaaaattatatttagaaaagcatggaaactagtaaagactttcaaaggtcaaagtgtgaaaaatcccccacgtgattcagctgtctacttcagtgggcatctgaggcctttaggggaaactgtgggaagtgatacaaaacactcaactcagaactaccccacccaaggggtgggggagctggggcatttacaccccaaccctcaagagagtcatttgttaaaagctatttctggggttgtgagataggaggtgagacttgactccagaggtggggctcaaacactggtctagattgaggactagctaaaacagggctggggtgaaggcagctttcaatctgacacagccaccagtgtgttaagtcagtttactgttgccatggcaacacccagggttaccaccccttttcaaagcaatgacctcaaagttaccaccctttccttagaaatttctgcataaactgcccctttatctgcatgcaattaaaactatgtgtaaatacgattgcaaaagtgccctgagcagctactctctgccaatggggtagccctgctgtgcaggaacagtcacagagctataacaccgtcttttcaataaagctgttttcttttacctctggcccttgaattctttcctgggcaaagccaagaacccttgtggactgagctccactttggggcttgcctgccctgcatcataaggtctttggcagttccatcctgtcaggcatgggcagttctgggagcaagagcctcatttctagttgcagaggctggaagtggaagctggccagagcacactgaaaagtcacagggatacaggtggggtgcaggccacttgtgccatgggtccctccaacttagagattcatgtcttcttacttggtgacttacggggtagtcagtcccacaaatgcttaaacagccagcattttaaaaaaagcatccatttgtagcatctgccaatttccatgttgtcaatattcccaccatggccaatttcaagctaccagtggtttaacagcagtcaacaggcgaggaaaacaggtaaagtaacactcctcgagatagacctgtagcaagtgacagagttgggggtgcagcccaagcctgccaaactaaaatactcttgcgccctttttttttttttttttttttgagatggagtcttgctctgtcacctaggctggagtgcagtggcaagatctcagctcactgcaacctctgcctcccgggttcaagtgattcagcagcatgaaaacagactaatacagccatgttggtctggctggtctccaactgccaacctcaggtgatctccccatctcagcctcccaaagtgctgggattataggcatgaaccatcgcacccggcttactcttgcacttttcgtgacatcaggttcaggtgagctcaggcgtttacggtgttgaccttgtgggtcaaagatctctggtgggaagacagacagacatccttctgatcaggatacagtgagtgcaaggatgaggggacagctggctgctgtctttcagataaagactgagctggcctggaggataagcaggaaccaacaggctgtaggaagggtgttcctggcaggtggaccagcatgagcaaagcaccgaggcagtaagagcggctgggctggggactatatatgagatgtcccctacaaagtgggctggcaggggaggggtggaaatgcacatggagttcagacctgagggcatccttgctgggtgctgaagtgacgggttgctgaggaaggcttcaagtaaggaagtgatgtggacaggtttccatcttattttctgtctctggggcctgtggttttaagagcagcaagaaaggcagggggcctggttagggggctaaggaggcagagattagcctggagtggtggctcatgcctataatcccagcactttggaagggtaaggtgggtggatcacttgagcccaggagtttgagactagcctgggcaacatagtaagcctccgtctctacaaaaaatgaaaaaattagccaggtgtggtggtacacgcctgtggtcccacctactatggaggccgaggtgggagaattgcttgagcccaggaggttgaggctgcagtgagctgtgattgtgctactacactgcagcctgggcaatagaactagaacttgtctcaaaaaataaaaataaataaaaataaaaaagcagagattagagaaatctgcccagagaggtggtttatagaagcccacccacacaaagccatggtctaagcacagctggactgtacaggaacccaagcacacagcaaccaccattctcaagcacaacaggaggatcccctctgaaagaccagggcaggagaacacatcccagacagaggacaggaccccctgccagcccttgccagcccctcccggcccctctcccctggtgagggccacactgctgcagagggtaaggagaattggattcaaaacctaatagactggtggctttgaacaaaccagtgcccctccagtgcaggcttctcatctgtaaactgaagactgactagaagatcgtattaaacactgccgtgctcagggcaatcttttcctagactacgcatttagcaaaagtgaagctgattgaattgagaagtaaattctagccctattgtttcagctatcctggtctttcagccttgtggaaatgtgagtgagtcggtgtgggccaattccaccagacacagcactgggccggttcctcactctgcggggtccgccttatgttccagttcacctcaagggcttctagcatgtgtctggcctcctcgctggtttacatgtgaatatagattttcctgtgtttttcctttgaccattttagcaagcatttggcagggagcagttaaatggatcccagagtcagtcatctggaaatccctttgcttttaacctttatgtagcatttcattggccctgggctttttgtaaacaagctatttgtgtatggggagggaaagctctgccctttgctctcactctgtcttctctccaggaggagctgctgacctggtattccagattgaggaacccacttttcctggtgggagggtcgctccctcttttactttgctcctcctgggtctgggagggggccatctgcccctttcttggctcttattttctaacacacctgttatggtgtgctgggttgctacatgcgatccaggaggccaagttaaatttcagataaacaatgaatagttttctttagcacaatgtcccaaatattgcttgggacatatttatatttaaaaaaagtttaggctggatgtggtggctcacgcctgtaatcccagcactttgggaggccgagatgggtggatcacctgaggtcaggaattcaagactagcctgactaacatgttgacaccccgtctctcctaaaaatacaaaaattagctgggcgtgttttccattttcttttgtttcttttgagaatctgttccttggaacttcatgaggaaggttaatgggtgcctgcaatcccaactactctggaggctgaggcaggagaatcgcttgaacccaggaggcagaggttgcagtgagctgagaccacgtcattgcactccagcctggacaacaagagcgaaactacgtctcaaaaaaaaaaaaaaaagaaaagaaaaagaaaaagtttagtgtttgtgtgaaattcaaatttaactaggcgtcttctatttttatttgctgaatctggcaacccatgtactctaagaactattctaaggggttctctggaacagctggccgtcagatccagatttgggtttccatggagcctctggttaggtctgcaacgtcattataataatgtggaaacacgttttccgttttcttttgtttcttttgagaatctgttccttggaacttcatgaggaaggttaatgggcagggtaggacttgggtattccctccagcgagctgccatcatatatcattaaaacctcactttggctaggcgtggtgtcatgtgcctgtagttgaagccactcaggaggctgaggcgggaggattgcttgaaaccaagagttcaagtccagcctgggcagcctagcaaggccctgtcactgaaaaaaaacaaacataaccaccaagccaaaaacaaaacactaaacatctcacttctttgaggtctaacaatctgtagtttagattttgctttttgattcaacctaagcattttagatgaatttaactcatgcacatttattatgacggctgttacccgtggtcttaattctgttatcttgttatgctttttgtttttagtgagccatgttttcttgaattagttttctttggtgtcttagaagttacacatcctttattatatcagaagttattttaaatagaaaaatattgagaccattttgtttacatatcaaatggcaagaataaaaataaccagaataccatctcattggttgacgacatcactcatctacttccattcactcctgcaaaccaggagttttgattcctttcttttcctccttccccatgtcaaatccattatcaagtcctgcaactcttaacttctgaacagtttttggatctatccaatttatcctcatcactactactccagtactattgaccattatctcatgtccagtctaagatatgattccccatgccattcttcttttacttcctttcatgtatttctttctttttcttttttgttttttttgagacggagtctcccttcgttgcccaggctggagtgcagtggcatgatcttggctcactgcaacctccgcctcctgggttcaagcgattttcctgcctcagccacctgagtagctgggattacaggtgtgcaccaccatgcctggctaatttttttggtatttttagtagagacgggatttcaccatgttggccaggctggtcttgaactcctaacctcaagtgatacacctgcctcggcctcccaaagtgctgggattataggcgtgagccaccatagctggcccttttcatatacttcacacttggggaaattatttgggattttcagaaccagatggttatgaccttcctaccctaacctggtcattaataaacaattattttaacatattgtgtatcttcagctttaatatttattttggacatatgcaataggttgcatgcctcattatttgtggtcagccctgtatttttgcattttcattgttggcttttattttctctgtactgtttcttccctatttctgaatttgctgtttggattcctcaatcttattctctgctgctaggccatcaaatgctggagtcctgtgagcttagttttctcttctctcttattgtctagatgtagataactcaccagtatgcatctggaggtctaaaccatctgcatagtgcaagcctgtgaatccacattggacatctcatggatacctcatacttaaccttctccaaaccaatctaaaactgaccttcctgccctaacctggtcctgttttagagtctccatctgtactagtcagggttctccagagaaacagaatgaacaggataggaaaaatgaggaattggctcatgtgattatggaggctgagaagtcccatgatttgccatctgtaaactggagacctaggaaagctgatggtagaattcagttcaagtccaaaggcctgagaagcaggggagatgatgatataaatcctggttggaggacaggagaagatgagaaatgtctcagctcaagcggtgagttaggaaaaaagggacaaattcctccttcctctgccttttgttctgttcaggccctcagtggattggatggtgcccatccgcattagggagggccacctcctttaccaagttcactgattcaaatgctcatctcagccagaaacactctcacaggcatacccaggaacagtgtttaatctgggtaccctgtggcccagtcaagttgatgaataaaattaaccatcacccatttcctctgctgacatcacccatccacttccattcagtcctgcaaaccagaagttgtgattcctttcttttccacctcccccatgtctaatcaatcaccaagtcctgttactcttaacttctgaacagcttttgaatcaatccagttctcttcatcctcatcacaactgttctagtcctattggctattatgtctcgcctagtctaaggcagtagtctactaactagtctcccaactcccttctggtctctgtcttctagacctgaccctgagggaaggtctagaaatgcaggcaggctgtccccattctgcttcctctacactaagatctagtcaggatccttcaggtgcccacaaggctctgcaccctccgagggctgccatacctggccatacctggcatgcgcttccttcctatcctctctgcacaccagccacactggcccatcctggccactcctgggctccgtgctctctgccaccacatggccttggcatctcctgctttctgttgtcttctttctttacgtgcagaagctcctgcctggcctttggagctcagcctcccctgaactctctgactcaattaaattcctctattctttaccctcgtagcctcacatgcctttccttcatagcattatatgacaactgtcattttacatttatttctttctattttctgatgaatgcctgcctcccccagtagactatcagtccccagaagcatgcaccttgtctttttcaattcattgctgtatctccagtgcccagcacagcacctggtgcatagcaggtgctcaagaagtatttgttttgaataaatgaatgatttagagctgatcacagctggaagagccactgaaggtcatcactattattaaaagtagatctcaaggcttagatcccagggaagggaggaccccagagaagcctgtgaaatgagagtcaaattttagagtgttgccgggcatggtggctcaccacggccatttgggaggccgagatgggtggatcacctgaggtcaggagttcgagagcagcctggccaacatggcaaaaccccatctcttactaaaaatacaaaaactagcctggaatggtggcgtgcgcctatagtcacagctactcaggaggctgaggcaggagaatggcttgtacgcggaaggcggaggctgcagcaggttttctgtgtttttagtttcctaagcttggcttggcacagcacacacaaagccatggggacccagagcttgtgacttacaccgtgaagcacagggtggggaagaatgagtgacagtgaagaatgttcccttgcccaaaaggagatgattcggaaaagagcagatggaggaggtgtggttagggataggagttactgggtccccaagaatgagtccagcaccccatccctcagaggatagaaacccatgttaaggttgtagggatcccggaagactcacagagaagcccactttggtggagcagcagtggcaaagggaggtgttggaatgcagtggcctcaggacagcctcctggggatctgggatcctgcacagtgtgagggagcagattagagttctcacacccctggagagagcgtgcacgtagctggggtggatgactgtcctgggggggctcaggctcccaggaatgggtgatcagggaccatggcagacctatagtcacctctgcagaggcagtggggactggggtgactcagactccagcgaggtcagcgaggaaccctcccagccaggcgactcaccccagatgctggagtggtaggtaagcccctccccacaccagctgcaccacctctgggtggagtgtgtgtgtgtgtgtgtgtgtgtgtgtatgcatgccggatgcgtgtctgaaatctgaattcagtgagtgtttacctaaagaacagtggagtgaagtggctgctgtacttcatgtttgcaactgtttcccaccttcagtggaaatgggagcttaaaagctcagataagccggggcgatggctcatgcctgtaattccagcactttgggaggccaaggtgggtgggtcacttgaggtcaggagtttgagaccagcctggccaacatggtgaaaccctgtctctactaaaaatacaaaaattagctgggagcggtggctcgtgcctgtagtcccagctactcgggaggctgagacaggagaatcacttgaacctgggaggcagaggttgcagttagctgagatcacaccactgcgcttcagcctgggcaacagagtgaccaaaaaaaaaaaaaaaatcaaaaactcagataaattaaatatgcagaaatagagaaagtaataggtttttatccctgaagatatagtctgggaaatttatactcattccatagtatttatacgagtatttttactcattccttgtattgcttgaagttccagcgaagaacagaatcctactcagatggatttcatggactattatggagaggtgggcggggcaaagagccccaaccaaggctgcagaggctcccaggcaccagcagcaaggggaagcctgccggggtggggtaggggattatgctgttgaagtccattgacagctggagacagaaagtagaaccacccagcaagagctggggttgagggactaagccactgcccagaatgagacctgaagaaggaaggaagcaggaagaaatatccctacttctctctctcctcccagcatccgaaacctggaagccagccagcaacgatgtgtgggtgatgcagtccacaggggccaaccttccagggcccacggcagggtggaaagatgggtggaggggggcttgagttaaagaacagatggggaaactgaagcccagacagggtaaggacttgcctaaggtcatttagcaattgaagggcaccatgaggactcagcccctgacttccttcttctcataggagggcttcctgctcaacaccgtgctttattgcctgcacacacagctgcgtggtcgcttctcattttcagactttgttgtaaaaagaagtcggaaaatgcaaacattgtatgaagaagaaaagaatgtgttggcgtctagtcttccaggctgcctctctgtgtgtggacacatattgatttattttaatgttcttaattttagattcggggggggtgtgtgggcaggtttgttccgtgggtatatattgtgtgatatgggtttgggcttctgttaatacccaaacagcgaacataggacccgataggtaatttttcaacccctgcccctctccttccctccttgctttttatttattttggagacagggtcttgctctgtctcccaggctggagtgcagtggcacggtctcagcccactgcaacctccgcctcctgggttcaagcgattcttgtgcttcagcctccggagtagctgggactacaggcgtgaccaccactcccggctaagttttgtatttttagtagagatgaggtttcatcacgctggccaggctggtcttgaagtgacctcaggtgatccacctgccttggcctcccaaagtgctgggattacagtcgagagtcaccaccgtgcccgactcctccttgcttttagagtccccagtgtcttttgttcccaaatgtgtggacacacatttagtaaaaatgggagtgggctttgtaaacctaaaagtatttgagacaggcctcaatcaattgagaagtttattttgccgaagttaaggacatgcccagaagaacagaacacagaatcacagaaacagtctgtgcctttctacaaagatgattttgagggtgtcagtacttaaaggggaaaagcaggctggagggaaacgagggagggtgtggtcatattactgaattcacatgttgcaagagaaaaggagtagatgggggactcgtcaattatgtattcatctagcactcagtaaattggcactttaagtaagataaggtgaaccagagtaattggagatatctggccttttatctctacctatctgcttaggcacaaaagggaaggcgttttcttgcatgactcagctttcagcttaatttttttcctttgggtagagtgaattggagtcccaagttttattttcctttcacagtttaggaagtcgggagaggtgggttcgcctgggaactcatagtgagacctgcactctgaattccttggaagacagaggagaaaaatgaagggaaaaaaaaaaggtggggaggtggtggagggagagagggaatggttggtgctttggccaagcctgagtttccccagctgctccttgtttaggcaggagagacaggcaaactgcagagcacttgtgagttcccatgggagcccctgcgccctgtgggtctgtttcagcattgtcctccgtgctggggatatcccagctcccagcttcctggaaggctgtcgtgttaaccacgttaacactttgtgtggggctcagcacttgtggagtgcccgtttagttcttagagtcgccctgtgcagggccaggtaatgcctaccacgtcctaaaatgcactgcgtgccccactgtgccccactggaggtatgtgagtgacatttcatggtgttttggtggacagttttaatttcagtaattacatattgatatggtttgggtttgtgtccctgcccaaatctcatgtcaaattggaggagggctctagtgggaggtggttggatcgtggacgtggatttcccccttgcgttctcgtggtagggagtgagtgctcatgcgatctgatggtttaaaagtgtgcggcacttcccccttcatgcgctctctctccggctctgccattgtgaagatgtgcctgcttcccctctgccttctgccatgattgtaagtttcctgaggcctttcagccatgcttcctgtacagtctgggcaactgtgagtcaattaaacctcttttctgtctttctttctttcttttttttttttttttagacagagtttcgctcttgttgcccaggctggagtgcaatggcacaatctggggtcactgcaacctccgcctctcgggttcaagtgattctcctgcgtcagcctcccgagtagctgggattacaggcatgcgccaccacgcctggctaatttatttttatttttttttatttttagtagagacagggtttctccatgttggtcaggctggtctggaactcccgagctcaggtgatccgcccacgtcggccccctaaagtgctgagattacaggcgtgagccactacgcctggcctaaacctcttttctttataaattacccagtctcaggtagttctttatagcagtgtgagaatggactaatacacatgtgttttaatgcatcttagcggggctgatcataaacatatttgacaactgaatggcacaggcatcaacgaatcagaacggatgctagcagtaaatagccatgaatgtctctgggactcataactgaactgaaaggggctcaattttccccacccgcctggtgattggggtgctcatagtcccccaagagtgggttcctgctgttttcaccccaccatcctggcctccagaaatccactctgagctttgagcttccatacagggagctcaggggagggtagggaagaagaaaggagcgtgggggtggggggagggctgctgcctggagctgcctctcacacaggaccccctggatggtcactctgtttctgggatatttaacccctgaaactgtcccctgagcagctgtgtcacccctgacctgctgctcagtgtcaccccctcttttattttaagaaacagagtcttactctgttgcccaggcaggagtgcagtggtgcaatcatagctaactacagcctcaaactcctgagcttaagcaatcctcctgccttaagcaaccctcctgagtagctgggactacagatgcatgccaccatgcctggctaatttttaaatgatattttgtagagacaagatgttgctatgttgctcaggctggtctcagatttctgggctcaaccaatcctcttgccttgacctcccaaagtgttgggattataggcgtgagccactgcgcctagcctcatctctcctgttttcatgtgtgcctttgtaaattacttgtatttcactggttactttttgtttctataacatgttttattgtgacacataaaatgcaggaaaaaatgcataaagctcatatgtgcaggttaacacaggactgtaaaaatatcctacacaaagaaggagaactgggttccctggggcccccaccatctcttcccatgacagcctcctgatccccagagaaaagcactatcttttttttttttttttttgagatggagtctctctctgccgcccaggctggagtgcagtggcacagtctcagctcactgtaacctctgcctcccgggttcaagcgattcttctgcctcagcctcccgagtagctgggactacaggcgtgcaccactacactgggctaatttttgtatttttagtagagacagggtttcaccatgttggtcaggcaggtctcaatattctgacctcaagtgatccgcccacctcggcctcccaaagtgctgggatttacaggcgtgagccactgtgcctggctatcctaatttttataacgctaatttctttgctgttctttatagtttcaccacttaggaaagcccttgtttgttttgtttgtaaaatgacagtctttttatttatgaaaatcttggtaatcctggttttgttttcatcccctccccaccatgtcccctcctctcccccagcccaccatttatggcaagtgaaatccacctctgtttactgtgggtattcatttctctcttaacatgaattataatacataaatacgtttattaaaaatttttttttgagacagggtctcgctctgttgcccaagttgaagtgcagtgggtgatcatagctccctgcagcctccaactcttgggctcaagcgatccatcctcctgcctcagccttctgaatagctgggactacaggagacagccaccaccacacccggcaattcagagaaaaattaagtaaagaatagcatgtataaatgagatgggcaagatgatgaaggtggtacccaaagaactgaagtttgggaaacgttgattatcttccatttatgaagaaaaaaaaagtcttggggaggtctctggagggtcagggactggaatccaggtgcgctgacctaggccgacgtgggccaccgggacaccacagcccttggggcgccggcggccggtgttccttcagggagcccagaggctgcagtgccgctatgcaccaccagagggcagcacggccccggcttgcggctcccggccacttcccacgcgggcggctggggtggcgctgggcggctctccctggggattcgggtttgcctggactcatcttagtccagagatcctcaaacgagctctgggacacactcccttctaaattacctgggtgcttgttaacagtgtagagtttggggccttcctggacctacagaatcagcatccctgaagctccaggtgtgtggcgtgggagctagggggtttggacagtggggtgctggtcaggggagttttgagaacactgctccagggaggtgggcactgtctcccagggtcagagtttgggggtgatgtgtgtgtgtgtgcggaggattatcacacacaccgagagggattgccggtcggaagcctgggcttgcatttgggcccacctcttacttggatgggtggcaaattcttcgttaagcattttgcatctacgcaccctccatttgaccacccatccatccatcatccataaatatatgataactaaacccttaccatgtgtcccttctgtgtgtggagatatagtggtgagcaacacagacagcgtccctgccctcctagaattcatgcctgtgtggaggagccagatagcagcaaataatccctcaaatataaaattacatgttaggctgagcgcagtggctcacacttgtaattgcaacactttgggaggccaaggtgggagggttgcttgaggccaggagttcaagaccagcctgggcgatatagcaagaccccatctttacaaaaaatttaaaataaaattacaatttataggagctgccttgaaggaggagggattcatagggtgctgtgtggatgaaaagagctctaggaacctgaggatgtgaaggattcttcccttaggaaattatgcttgaattgagatctgagggtgagaaggagtgaaccaggtggagtcagagggaagagtgtttcagacagaggaaactcatgtgcaaaggccctgaggtggaaatgagctcactgccttggcagaagagtgtggttggagcaggaaggaagagagggactggctagacctggggtgtgggcagtagacaaggaccagtaccctcaggttctcaaatttcccatcttcaaatggggcaacaagagaaccatctatcttgcaaagaggataacatgtaatgatgagcccaaagcatctaatgtagtgcctggtacacagttggtgtcaatattgggggtgggggtggatctgggcagagggtacagcctggttagagagctgtggggaagcactgggcaactgcggggaccagagctgtcttggccacctgcagggaccagctgagaagtgtgtttaaccacagtgaacattaccgttggcatcgctgtcttgttgaaaacaaagtgaaattggagaacatactgttgtcttgaactaggccaagatgactaattattagactcacttttgaaaggttaccatatacagacatgcgctgaggtggagagaggagagtttggaaatctgattcattctgaaaccccaatagatggaactcttgctcagtttctgagcataatgactgtgaacattcggtttaacgcagctgtcaccacaggcaaggtgcaaaacaaaatgtttcgtaccagctccttggagtgtcatggggcagctcatggcagccctggggagatctctgctagatggtgaagggtgtgcaacgtgggtgctggtgttggggaattgaggggacgccagacctcaaatctgggatctgagtctgagggatggctttgccacaagtggaccatgtggcttaggttaacttcctcctttctttgggccttagtttcctcatctggaaaatgaagggctagaccagatgctctccaagaacttctctagttttgttgttctatggcctttgctggtggtgtgactttggatgttaccttcagctcctgggttttagtttccttttgagcattttagagttccccaagagtgttggtttatttcactccccatttgctgcccccaccaatgaagtctagcgactcgaaatctccttctccagactccactgagaacaaaccaccctagttccttgccctgtgggtcagtggtttaatctggggatgcgtgagtcccttggtcctgtctggagatgcataaatccactgtggcccgatgtggggattccaagtccttgaggtctaatctggggatgcatgtggtccagtactcacagacccaagggggcctgaaggcacctggacccttcaggaagtcctgtctctgggacttacaagggaacattcgtgaagctggtatcagggctgaacgtggattggggctttctgagggccaagtgcaggcactcatttccttctcacattattcccacctctgaggggcagagggtctaagtaattttcccaaggccacacagggagcaaggggcagaggtggcatgtgtgcccaagcctgtttgattcaaactgtcgttaactttggaaactgaccccaccatctcatttatttctcacaacaaatacatccattaacaggtatcaaggcttagaggcttcatagcaaaacagagtggagacctggtaggtaagcaggcagcttccagatttctccacccagcccccacttcctggccaggaactggaggcagggaagttccattgcccatatagctgcatgacttttcatttgcccgttcctgtggtcagactcagtggtgtgagacttcctgtggttgagccgagtgatgcaagaacgtcgctgtgcagggctgtggtcctacaccgtccactttattggttgtctaagacatcttcaatggtaaaatgggaaaggcatagtttttgtcctgaacgttgtccttacacctaagccagacttgatcagatgccacatggggcgtatcctcctgagcatcccacgtctaccgcctgccttggatgtctgacatcaagtatgtaagtgcttgtgtctggacctgaacttcactccaaatagcggggttggctacaggtcagttacccatgtgagattatagtgccctgactggttattctttttttttcttttcttttcttaagacagggtctagctcggttgcccaggctgccgtgcagtggtgtgattgctctgcctcctgggctcaagccatccccccacctcagcctcctgagtagcttgaactacaggcatgcaccactgtgccagctaacttttgcattttagtagggatggggttttgctatgttggccaggctggtcttgaactcatggcctcaagtgatccacccaccttggcctcccaaagtgatgagattacaggcgtgagccactgtgcctggccacctgactggttattcttatcaagatgagaacagaactgaaattgaacataagccaccattaattatcatcagtaatgtatttaagaatataaggcataattttaagttacactaaaataaatataaatggcttgacacaagtaaacgttcttgctcaacccttgataccctctagggatggatctgaagatccatcccctagacacatgaatatgatttttcaaatcattattattacagttttatagagacagggtcttactctgttgcctaggctggagtacagtggtgtgaccacggcttactcctgggctcgaactcctgggctccagagatcctctgtattcatctgttctcgcactgctgtaaagaaatacctgagactgggtaatttataaagaaaagaggtttaattgccacatgattctgcaggcaatacagatgctggcatctgcttggcttctgaggaggcctcagaaagcttccagtcatggtagaaggtgaaggagaagcacacgcatcgcatggccagagtaggagtgagtggaaaatggggcactgctacacactcttttttttttttttttttgaggcagagtcttgctctgtcacccaggctggagtgcagtggcgtgatctcagctcactgcaagttccgcctcctgggttcacgccattctcctgcctcagcctcccaagtagctgggactacaggcgcacaccaccacgcccggctaattttttgtatttttgtagtagagacggggtttcaccgtgttagccaggatgttcttgatctcctgacctcgtgatctgcttgcctgggcctcccaaagtgctgggattacaggcgtgagccaccgcacccggcctgctacacatttttaaacaaccagatcttgcaataactcactcactcacacaacaataacagtaccaaggggatgtcgttaaaccatttgtgaaggaccaccctcatgatctagtcacctcccaccaggccccacctccaaccccagggattacaattcaacatgctatttaggcggggacacagatccaaacaatatcttcctctcacgtagctgggactagaggtgtgcgccaccaagctcggcctctggtttttcaaatgatatcccaaatcggagctcctctcaccacttccactttgccacttttattcaagccactagccaacaacgtgggttatgacagaaacagaagcctccgcgctcctttcctcctccaaacttgctcaccttgtaggtgactctctatgctgcgggatctgttaaggcttgagtcagatggcaaagtctctgctcgaggccctccgatggtttcccttccaccaggagtcaaagcccaagttcttaccagggcctccgtgacctcactgggtctgccctggttcttctctgggctcatctcctgctgttctgcttttgctcacttcgttccagcctctctggcctccgcgctattccttcaggcacatttctgctgtgtggcttttgcacttgcttttccctctacctggagagctcttgccccagatacccatgagtctccctctctcccctccttccggtttctgctccattctctccatcccagagaggctcttcttgaccactctacctaaaatatcagcttcctgcaataaaatatcaacttccttcactctttattctttttccctcttaattttattatatctcctcctgacatgtatttgttgattctttccccactagaatataagctccacaaaagccgcatctctgctcctctccctgctacatccttagagtcaagcctagtgcctgaccacatcagtgacattggttgaattgaatgaaggatcaataaaggaataaactgaggttgggcacggtggctcacgcctgtaaccccagcactttgggaggccgagtcaggtggatcacctgaggtcaggagtttgagaccagcctgaacaatacggtgaaacctcgtctctactaaaaatacaaaaattagctgggcatagtggggcacgcctgtaataccaggtactcgggaggctgagatgggaaaattgcttgaactcgggcggtggagcttgcagtgaaccaagatcgtaccactgcactccagcctgggcaacagagtgagactccatctcaaaaggaataaacggagctttctatggtaagtatctttgctcatggcaggagcctcactgacagtttcctgagtcacactttccggtttctgtgttgcgtgtacattgaaggcattccaatggtggatctgagcctcaggataattggatatcgcttttcagtatgtagttccacatcatcatttttttggatgcctttaatctttcttcacttcttcttctgtcccatcaccaacatgagcagttggatttattttagggccctttctcacaaaaagcaaagtttcatcactttgtgggagtagctggggacacataggaccaagagagaggagcagaaccatgctgagaggccctggcggtggctgcctctctcgctggctaagggactcagcttcagcacctgcccccagttctgcagtgcacgatttgaacccatccctcagtgaaataacgaatgatcccaatcatagtccttgaggacagcttacaagtgattcatggtgaactcaagaatgccaaggaatcttgtgggtttatttgctccatctctgctttaacctcgatgtcctcccggctccagtggctccgtcatgttctcaactttgtgtactcatggttctagaatcccaacccctggattcctgtctaaggctcagtctcttgctaggaggaaagacatcttatcagatgttaggtgtgagatgtcggaggctgtgtttggtctcccagcattcttgtgagcgaagggcttttagccacattctccctatcgcttgatttctctctcactttgtgggaaagtagacagcaggaccatcaccccagttcaggattgaaaactcagatgtttaactttgcagactcatgatgggtttctctccttggcatgtggtctcctttatttgagctgtatgtgttgaggacctactgtgtgcactagggcactccatgggtatggggaggagcaagacagaacccttgtccctcaagactggaatccagaaaagggtggggataagtgtggcaacagctctggggtaggaagagggacatgggtaagagagaggagagagctgtgactccagctgcagtggggtcagggaaggacttactgttttcataaaaatagcacagatgaaggctgggcatagtggtggctcatgcttgtaatcccagtactttcggaggccaaggtgggtggattgcttgagacaggagttcaagaccagcctggacaacatggcaaaaccccatctctacaaaaaaaaaaaaaaaaaaaacaacccaaacaaaaaaattagctaggcatggtagaactcaccggttgtcccagctacccaggaggctgaggtgggaggatcacttgagcccaagtggcagaggttgcagtgagccgagatcgcaccactgcactccagcctgagcaacagagccagactctgtctcaaaaaaaaaaaaaaaaaaaaaaaaagctcagatgccttgaaaggcaaaacatttagaaaagctacaatagataaaacaaaggacatcccaggtttcctccctgcaaaaccatcattcaagctatgtttctatgtggagtctctagatggagagatagacaggcctacttttataaaatgggatacttttgaaagtaaaagttattagaggtaattttacttaacataaacagaagacaaggaaacaaaaccaaaggaatctgaatcttaaataaatattacattatcaccaatggaattggttcctaaaagatccctctaagttttttttttttttctttttttgagatggagtttcactatttttgcccaggctggagtgcaatggtgcgatctcagctcactgcaacttctgcctcccgggttcaagtgattcttctgcttcagcctaccgagtagttgggattacaggtgcataccaccatgcccagctaatttttgtatttttagtagagacggggtttccccatgttggccaggctggtcttgaactcctgacctccagtgatccacctgccttggcctcccaaagtgctgggattacaggcatgagccatcatgcctggtcaagatccctctaaatttaacaagagattaggaaaaacattgcgattggagttacatagttttttcaaatctttgtattttattataagcacaattaacaatggtattcttctcagataaaatacttaaattaatccaatgataggatttttgagagtaatgtgaatttgttcatcattaaatcagaagacaggcatattctatgaaaagtctgtaaccaagttttccatttgtattagtccattttcatgctgctgataaaaacatacctgagactgtgcaatttacaaaaaaaataaaaataaaaaaaggtttaatggactcacagttccatgtggctggggaggcctcacaatcatggcagaaggtgaaaggcagatctcacatggtggcagacaagagaacagaaattgtgcagggaaactccccgttataaaaccatcagatcttatgagacttattcactatcatgagactagcacgggaaagactcactccgatgattcaattacctcctaccaggtccctcccacaacacatgggaattatgggagctatgattcaagatgagatttgggtggggacgcagccaaaccatatcaccattcctgtccttttctcgtgcacccttcacagatgtgcgcacttagtgctctgagttctgaataagcttagccatgtgtccatcaagatgtggagtggctccatcatccccaacagtctctgcccctgatgggctcctccttcctcacttggaccctggcaatcactgatctgccttctgtacctgtagatttgccttttccagagaatcacataattagaagataatctgtatcagtccattctcacactgctataaacatactacccgaaggctgggcacctgtaatcccagcactttgggaagccaaggcaggtggatcatgaggtcaggagtttgagaccagtctgaccaacatggtgaaaccccatctctactataaatacaaaaattagctgggtgtgatggtgcgctcctgtaatcccagctacacaggaggctgaggcaggagaatcgcttgaacctgggaggcggaggttgcagttagccaagatcacgccactgcactccagcctgggtgacagagtgagactctgtctcaaaaaaaaaaaagatactacctgagactgggtaatttataaacaaaagagttttaatagactcacagttctgcatggcaggggagcccgtagaaacttacaatcatggcagaaggtgaaggggaagcaatgtaaatcttaattctaatgttttcatcacagtatctcatgcctattattggctgtgtgtggtgttccttttcaagtctctggcttcaacgtctgcagggagtaaatttcccacctgctgggggtggggagcaccattacctgactatgcaggctcataaaagtgggtctgggttctaaatgctcatcaaacagactctcagccacttctgttttcagccgctcttgcaccccacctttcagagggattctggttgatgcagagttttgtggctcaaatagattttctgttctcaggttcttcaccctgcaggcacacataggacttaactttctctcatttgctgggccaattaccaatcattcattcactttttaatcttccaaattttgatgacatcttttttttttttttttttgagtcagagtcttgctctgttgccaggctggagtgtagtggcacaatctcggctcagcacaacctccgcctcccaggttcaagcaattctcctgcctcagcctctcgagtagctgggactataggtgtgcaccaacatgaccagctaatatttgtatttttagtagagatgggatttcaccctgttggccaggctggtctggaactcctgacctcaagtgatccatctgccgcggcctcccaaagtgctgggattacaggtgtgagccaccacacctggctctgattgctttcatatctttgtttttcttaatatctattatctgtctattcataattccattttcagcagggtctcttctgattttgacatttatcattaatttgggacttctgtaatgttatttgatttcaatttgtttccttaggtctctcttttgtgtgtcattctgttgtttaatcaactgatctttgaaagtttgttttaccaaattcctgttcttgttctgtcgttttatagcagagagcacctatgtgaagttttcttccagttttggggttatatctccttctaggctggattctttgtcttttgggtgctttttttcttgggggttttggtgggagtgtgtgtgcatagtttccatcagtttcttacttgtgtgtgggcatttctgttcaaatattctttttgctgttatacagtgtgaacttggactcatttctcagtgtgtctgagatagattttgccatagtttgaggtccagatattttttgttcttaacatttttcctttagcctgggatcatggtgggatgaggggtaggaaagtggaaaagcatattggggcagtgcatatttctggaagaaatatgttctcacttctgagggtgtgaaaatgtgctaggattgcacttccctggggagaaagatagcttccctttagaatgtgggatagtcagctgggcatggtagcacacacctgtaatcccagctacttgggaggctgaggcgggaaggttgcttgagccccaggaatttgaggctgcagtgagttgtgattgtgccactgctctccatcctggatgacagagcaaggccttgtcccttaaaacacaaaaactcagacgcggggtgatggctcacgcctgtaatcccagcacagtgggaggctgaggcgggaggatcacttgaggtcaggagtttgagaccatcctggccaaaacggtgaaaccccatctctattaaaaatacaaaaattagctgggcatggtggtgggcacctgtagtcccagctactcaggaggctgaggcatgagaatcacttgaacccaggaggcagaggttgcagtgattcaagatggtgccactgcactctagcctgggcaacagagtgagactgcgtctcaaaaacaaaaaccaaaaccagaacgcaggatatttaatactcattgccccagccttgttggggaggggcacaataagaaaaatcccatctggcatcctgaaacaaatcagtattggggtgagcccagtggggcagctgatggctgagtcaggctggtgcgatggaaggagctgtgagggccccgtagcttggagcatccctggtccccttagcagccatcataagacggagcaggcagggctgtagttggacagcccagtcaggaaatgccagccatgaatgagtgccccatggctgccttgggaatgtgtgccaggattggaatcctgcagttgaggatctgaaatgttctgaccaggtggctaaagagtatgacttcaggccgggcgtggtggctcacatctgtaattccagcactttgggaggctgaagcgggtggatcacctgaggtcaagagtttgagaccagcctggccaacatggtgaaaccccgtctctactaaaaatacaaaaattagccaggcacggtggtgcacgcctgtagtcccagctacatgggaggctgatgcaggagaatggcttgaacccaggagacggaggttgcagtgagccaagattgtgccattgcactccagcctggatgacaagagcaaaactccttctcaaaaaaaaaaaacaaaacaaaactgtgacttcataataaggtcatgttgctagggaccacgtattgacgtttctagggagaaatgagaaggaatacagcaaccgaataagacgatgttcgtttatgacatccatgatgtctttcaaggcttgagatacactgtcttttgtctaattagtcattgtgaccatatctccatggagaccattatgtttgtactcacaatagacacgtgtgcatccattaaaggaacacagttgccaaacgtacgctctgggcccagggtggagtggctttttacagcacagtcatcggagctgctgcaaaaagtgtcagaaaacaagcaaggagctgtccttattcatgaagagaggctctctctggtatcaggccctgggtctaggggagtgtgaaacccaggaaggcggggtgcacacgctcatgacaaaagttccaaaggcgtagattcactctcttttttttttttttcaaatgtgtgccaaagatttttaagctcattaattaatgaagggaccagtaagatgttaaaaactggctcaggagagaatgcagagaacagacattaatataggtaattaggaatgttttggtcaagagacacaaaattggtttcttccaagagcagtaaggagaatggggagaagatttagtctttcattaaaaaaatttgagagccaacaagtgctcagtagagtgagtggtgcttggacggaggggtggacaggccggatgggactcaagcgagactgtgctacccagacctgggcagtgctccagggatgcttagcagaggggcaggaggctgtgggggatgccgctgtctgggccttgtcctttttgtgctaagcatccccagctccctgcacaggccccaaatgtggtaaatgcatggcagaccttggggcatgaggggatgagaggggaccttccagaagagtagagtgggaacagaccatgaaagcttgggattgcagaccctagctctgccatgggacaagaaaccagtccctctcagataccattcggcactcgtttctgcctcagaactgagagcagcaaagggcttctgtgtttgtcctgctcctggcttcttttttctttttctagagacagggtcacgctctgtctcccaggctggattgcagtggcacaattgtagctgactgtaatctcaaactcacttctgggctcaagtaatcttcccactccggtcacctgctaatttttatttttgttttttggtagagacagggtcttgctatgttgcccaggctggtcttaaactcctgtctctagtgatcctcctgagttggccccccaagatgttggattacaggcgtgagccactgcacctggccttctccttgctgccttgtccaatgggatttcgggactcatgtgacttcagctaccttgtttgtactgaccatcatcactaactacagaaatactacaaggccgaagctctcaagcccctaacctggtagttacaaagggagaagtttcctaagctcaccagagtggcacttgacctaactacacacttctgcctggactcaggaagcaaactaccatggacctcgtcacccgtaatcacatgcacaggcaggcacttgctcatggccattttcttttgttttgtacacaagtctaataactccactatttttagtaaagtgagagttgatggcatggctgttggtaggcacatggacaccagcaggagggagtagctggaagcctgtcagtgaggtcaggaactggagaaatatcaaagcaattacacgaggccaggatggcatgctggggccgctcaatgtcagagcacagagcgctctactctggcctagcgcagccactgaccgttcttagccatagccttgagtcacccaggaaagagcttaccaacaaccaagcaggagctttgggatcataaagttctgggttcaattctctgctccctgtttgcagggctctaggcaaagagtctccctcttttgcccaggctggagtgcaataccacaatctcagctcactgccacctctgtctcccaggttctagtgattctcctgcctcagcctcctgaatagctggaactacaggcgtgagccaccatggccagctactttttttgtatttttagtagagatgggatttcaccatattggccaggatggtctcaatttcttgaccttgtgatccgcccgcctcggccccccaaagtgctgggattataggcgagagccaccacgcttggcttttttatttttatttttttaaagacagagtctcactctgtcacccaggctggagtgcagtgatgcggtcttggctcactgcaatcctgacctcctgggttcaagtgattattgtacctcatcctcccaagtagttgggactacaggcacgcaccatcacacccagctactttttgtatttttaggagaggtgggctttcaccatgttggctaggctggtcttgaactcctgacctcaagtgatctccctgccttggccttccaaagtgctggggttacagacagtgcctggctggtctaggcaaatcacttttaatactgctttcatattagagtgttgggaggattaaatgagtttacagagcacatagtaaatgctcatgaaaaattagccgctattggcagggaaatgaatgatggtcaacgacatgcaacaacatggatgagcctcaaaatcattctaatgacaggaagaagcaggcacaaaagggcacttaccgtccagtttcattcatagaaatcgcaaaacaggcacaagtcatctgtgatattagaggtcaggatattggttatgggggtttgccatttttgttgtaaaatagaacagatagaaataatgcagcagggaggtgaattttgaaatattgtatatttcaaaatagccaaaagaggattttaagtgttcataccacaaagaaatggttaatatatgaggtgatggatatgccagtttaatacccttatttgattattctacaatgtatacatatatcaaaacatcacattgtaccccataaatacatacaattattatttgtcaattaaaaattaaataacagccagtgtggtggctcatgcctgtaatcccagcactttgggaggctaaggcaggaagattgcttgagctcaggagctcaagacgaggctgagcaacacagcaagacttgtctctactaaaaataaaaaaaaaattggctaggcacggtggcacgcacttgtagtcccagatacttggaggctgaggtgggaggattgcttgagcccaggaggttgaggcttctctgagccgtgatagtggcactgcaccacaacctaggtgacagagccagaccctggttcaaaaaaattaaataaaacattgaaaagattacataagataaacctgctgcagtttagggaattactgtgaggctacccctgaagctagtcctgatcacagtcttcttcctccctctcaatattttgtttcttgatctgagtgttagttacccaggggtgtttatgaaaagtgggggagcagtacacttacgtgcgcttctctatatgcatattatgcttcaataaaaagcttaaaattaggccgggtgtggtggctcacacctgtaatcctagcactttgggaggctgaggcaggcggattgcctgagctcaggagttcacaaccagcctgggcaacacagtgaaatcccgtctctactaaaatacaaaaaattagccgggcgtggtggtgtgcgcctgtagtcccagctactcgggaggctgaggcaggagaattgcttgaacctgggaggcagaggttgcagcaagccaaggtcatgccactgcactccagcctgggcgacagagcgagactccgtctcaaaacaaacaaacaaaaagttagcacttattatttttcttaatattattatcaaattaacttattggagctttaaactcttcatctgtctaatggggttgattaccccattttttgcagaattgttagaagttacagtattcacagcatattcgttggttcattcagcagatatttactgagtgcctgcaggctcgggcactgttctaggtgctggtgataaagacgtgatccaaacagacaaaaatcatggggtttacatgctggcgagggagagagacatgctaggcactcacagagaactatgaaatttggacagcaccctctggttcagaaaataagatcctggaccacatctctatcccatatggtgaagtttgtttggtttggttttgatttggctccttaaataattagcttcactattacaaaatcttggttagcacaaagtcagatgagtgaaagtgtgtggatgctacataaacaatgcctgccttttctagaatttctaggtgcaatcaaattgcgaattagagcaaaccacccgtcataagccgctgcgttgaggaccaaggaatgaatagcccagcaaagaaatgctttctctctcctgttttgaggaactcgggccctgttttgaggccctgcaccctgcaggcaggaaagcgttaagaaagaaatgtgcatttccactgaacaagaaaatcaacttagaaaagaaatgtgtattggaaaatatctatttgcctgcaaaataatgtaaaaataatgagctcctattcccctttgatgtgcagcgcacgcttttaaggaaagattctgcatttctgagatactgggcctggcgtgtaatgaagtggttgttatggcaacaactttcaaaagcaagtattttctgagatgtgctccacacagccagcgtgagagaggaaaacatgaaaacagagacagggagatgagctaaacagaaggcattagatgcggagagcatccgctccaggtccaagggggaagaaaagtgcccgctgcccccactttcccagcctggatttgcaaagctgcaggggaagacagacccctgccctggaaggggccccttgaggaatggagctgggacaaggcaaggttggggctgagacagtgtgagactgtggagagtgataggcggcttgagcctgggggctccatcaccagtccctcaccacggccccctcctcccagcccgactccagcctcagcctctgcccctcccagcctccatgctcttcattcattccaggtaccagtcttcccactggcagtccgggccttctgcccattccaccccatcatgtgcctggggttcctgccaggctgggcatagcaccaggagccggcattcatcaccctctttgctctgcacagcaaccccaagtgcctggcaaatagtagctgcccgatctctatttgtggagtcaataggtggtccttctctgacagctactgctattgtccccattttgttggtgaggtagttgaggcttggagatgttgagtgatttgccccagccctgcaggcagcgggcagtggagctgggctgcccccacccctgcatcgtgctgcctctcagtaccccgatcccagcctccctgtctttgttcatactgtgtctctgcctggtgcaccctctcttgtctcgtaagacctgacccaaaggccatcctgtggccatgatgtcatgaaaatgctgcctctaaatgagactcctggatgtgtcagtgtctggggatggggtcctcactacctgctagggagtctgggctgggcacacatgtcctggcggctgggaactgccaggaagagagccgcctccagagggaccgtgtctgtcccattcaccatgctcctccccatgcaatgccgggcacagcggtgacactcaggaacccttgggtgaatgagagactttggaacgcagacagtttggaaaggtcctggtcggtcaggttttggagatctttggggctgccccagccaaagctttcttgtgattggataacctcctcaaacgcagcccaagctcatatttgacagtgatggtgaggaggggtgcatgtgagtgtgtgtggcatgtgagtgtgtaaacgtgtgtgcatggccttgttggaggtgatttgcctgaaaaaggagtctgggctacactcgtgtgtgcctctgtcaggggtgagggagatgcgtgtgtgcacagatttgaggagatctgtctaaaggggcatgcatctcaatatgtgtgtttcaggagcaggtagtgtgtgtgtctgtgtgcgtgtgaatggccttgattgacaggacttgctctgtaaggggtcgtatgtttgtatgcaggtgtgcctgcatgagggtgtgtcttgtgtgtgtgcacctggtcttgatgtatttgtgtgtgtgcatgtgtgagagagatgagcatgtgaaggagtgtgcttcaaagagaggtttgtatgaacgtgtgtgtatcaggggtgtacctgggaatgtgggtatagatgccggggaagagcagtggatacattcctggctgctgcatttgtcaggtagagggagcctgttgaagtaaatgggctgtatttttggttctctgctgcgagagagcttctggcagctgtgctggcaaacctgtgagtcacagagagagaactatgccatgatgctgtcctctggatcataaaatgtaagttagagccagaagcagccttggcagtcacctagttctatcccttgtgttacaattgatggaaaacagagaagggaagcaaattctccagatcacacagcgaactcaggatagagctggaacttggacttgtgtctgggtctgggacttcccaatcctccacttcctgctgccaggtccctgaggaggagagagagggttaaccacagagtaattaataccaggcaccagagtattataaaatttcatttccactttaattaggggaacttaaaaaaatagaagtctttgttgtgtcaattagttgattgactatcgttggtttctgggttagggaaacttgatctgcagtgaatgaatttgtttatcagggaaaaggagccagggggtggaaagagaaattcaattaagtgtcaggctgctaagtgacaggctgcatttgatagaacttttagcttaattgcttgtatttcattaagagttttatttatcaggagcattcttcatgttaaaaatctcaggtggtgtctgcgtggctttgggctatttttctgcattgattaaggacattgaattgtggacctgaagaattacctgggacctcagagacattcttgtccgggcaaaaaccgtcctttatcctagctcccggggcttgtgtccccctcatgcctcccctcccatagttatatccaaagtttagtaagtgttgcatttctctggggagaataatctgtatttcttctttagatttgcaaagggataggagttgcatagacaataatactcagccaggctgaccaacttgtttggttttgctctttgttgttgtttttcttccccataaaaacacatttaattgcatgcatagttgtaaaattgtacatgaaggcagtgctagaaactaagttactattactttgcattaacaaaaatgactgtaaaaataactatccttgagaagaaaatgagcctgacaagatttaatttaattagagatatgattactatcagggttttccaagaatgtcatatcagctcaaaagtagatgcattttattataaatcaaatgggtcctggtgccccagaggtatataaaaaatatacagcgtggcttacttgagttattcttttctgaaggcctccagacccttcttgtgaggagaactgtccaatgcataatctataatggctatagaaagggagggaaggaggcagggagggaggaagggaggagggagggagggagggagggagagacaacctgctgagccttggggctctatcaccagtccctcaccatggccccctctggccatctgtgtgcacctgtggtcccagctactcaggaggctgaggtaggaggatcacttgagcccaggaggttgaaggggctcacttcaatcccctctgggcctctctgagcctcggttctctcatttataaagatgaccacttgttttataagtgagagaaccaaggctcagagagggccagaggttttccgaaggacacacagctagctatgggcagaaccaggactggcacttgttcttcctgcttcttttccaagaacctggctctgtgtggggcctctgagttgctgggcttaagtccttcagggacagttcagcggggcagccatttcttttccttttgatctattagggcaggagaacagagtggttaggactgctgtcaccacctgggcttaaattctggatcttctgcttgttttgtgaacctggacaagtgctttgaccacactggtaaatgggatagtaagatcatctgtctcacttggctgtcaggaggatcatggggtactccatgtaatgcacttagactatacctggtacatagtaaatgctcagtaaataccagctataattattattgagcttccaagtaagatttcatttgaaaaaatgttcctatttttttttttttttttgagacaggatctcactatgtcactcaggctggagtgcagtgacacaatcacagctcactgcagcctcaacctcctgggctcaagcgatcctcccacctcagtctcccaagtagctaggaccacaagtgcacaccaccaagctcagctaattaatttttctttttttgtagagacagggtcttgctatattgcctaggctagtcttgaacttctgagctcaagcaatccttcgcctcagcctcactaaatgctggtattacaggcatgagccaccacacctggcctctaattcttaaaaataattgaggagcattgtgctggactaagtagctccctctccaatcagttcttaagaagaaataatttactccaggagatgggtggactcagacgtggtccatgatgagggctggggaaccgaggtttcctaccactttgagtttttctcttcctggcactccctttggtccctgattatttttcttttcttttctatggtaaacatctattctggctctattctcttcctctttcctcttccccacctttcctgtcttatctctccctccctccgtccctcccttcctcccttcctgactccctccctccctcatttccttccttcttccttccttccttccttttttccttccttccttccttctttccttccatccatccatccacccacccacccatctgttgggtgtgggaggtggcttctacagtctcttaagagctgattgtgcctgtctgtttctgactctgcatttaatgatgtcacttggtggcttgacatcagccatggtgggaacgtttacgccatggaaattggagaacactacaaataaaggctttttttgggattatttgtttgctattttgaaaactatttttcagcctactgtttcatccatccatccctgtatcatgcatccctttctctggatgtccagacatccaaccaccaaaccatcatccgttgaaccattcattcatctgacatgtattaagcacttcttgtgagccaggccctatacaagctccactgggagggcagaattggccggagcctgctccctgcccttgaggaattgacactttagtggaacagacaccttacacactcaaggactgtcctggacatcatctcatttgatggtcatggtcggtattgttatctcagtgtaacaattgaggagattaaggctcagagaggtgaaatgaatggcctgaggtcacacagctggctgtccattcatttgtttactcgtatgacaaggtttacagaggtgcttaaatccagccagatgccaaggtgaaaactgattttcaaacctgtccttcagaaataaaccttcttaaaaaaataaaaagaaagaaaataaaagaatagggaaagttatttttccatcttgcttagatggggacagttttgaatttatttttttcagattgaacaatcgttcctcaaatggatagtgataggtgatctaaaaaataatctttaaaaacgtcgccgagttgggcatttcctctgggtgacataactcagtgtgacagaatgcatttaaattcacagaaaagaaatggcaaggagtgcaatgtggaaggtgtttgtgtggctgccagctccttaaccctctcctttcaccattcttccccctttcctccactgcccctgggcctgtgggcacattcgcttccctcactgcctccagccatatgtctacacatacacatacgcatacgcatacacacacgcatacacatacacatacgcatacacatatgcatacacatagcagggatcaaaagcacttctgaagatcctgggtcccagaatgtgggcagctgataggctgggggaagagggtgtgggtttcctaatgggccaaagaaagaggtgccaggaatgcgtggaagatgatgtctctcttttctccagattcctgtctgttcccattgtatttccattcctgcacatggccaccatggtaacaagggaagggctttgctttgggaaggccagggccaggccaggtgaggctcacggacaaagcatctgctggtaacttagattcagcgtgcgaggaaaccatgctacaattcctccctggcttggtgggtggcctccctgtaagagacagaaccccagggccatgctagggttgcagctgagagtgtggatggcagcatggtgctcaaggtgctagagtttcttctttgtgatattttagttgtacttcccaaggtatgttccattatttgcacactggtttctagtttctggcattctgcatctgccattatggctgggaagaaagaagagagtagagaactccttagggaggagaaagaggatctgatggagaggatgtcttaagtcagctttcctagatggagattcttgcagaatttttgcagagagtaaattattgcagatggggagtgaagggagctggacatggtaggggaaggacctgaagctggagatcagctttaacctgatccacaggaagctctggagtgtgaattgtaccacagattggcccctacttgaggccaggggactggcatttgtacttccacgtcagtcactagctactggttgccactggtggggatgggagtgagaagagagtagcttccaagagggggcagatctgccaaagtcaagtctctgggaaagggaacagggtgagccttcaggactcacaagacccaggggctggggtactagtctgataaaaggggtgttatggtttgaatgtgccccctaaatttcatgttgcggaaaccaaattcccaaatccatatgttgattggaggtggggcctttgagagataattaagatgagataaggtcatcaggctggggcacccataatggaactggtggctttacgggaagaggaaacctgagctggcacactccctggctctcatcatgtgatgctttcaccacattatgacacagcaagaagggccccaccagatgcagcccctcagccttggatttcccagccttcagaactgtaagaaatacatgttttttcttaataaattacccagtcccagatattaagttatagcaacagaaagtggaacaagacagggtgtatgggttgggaagcaacagctactacaaggagaacctcaataagacaggataaagggagaggagggactgtttccttccctgccctgggggactgtgggaggaattcagcagcaaggaggaggcactcttcactcactgcaaaagttcacagaaagccctcttttaataactgggtgccatcagcaggtaggggaagaaacttgaaagacacattcatgaaagagagaccgaggtgagagatggtttaaatacttgctgctttgagtaaggctccaggaccagcatcaccatcatcacctggagcttgtccaaaatgcaggctctcaggtcccacctgaggctactgaatccaatccgaaattttaacaagattcccaagtgatttgtgtatacacttaaagtgtgagatgttctccttagaaaaaaggtattacaccaggaaatgtgcctcttggctggacagacagctgaagagtagcacaatatcttcattcgtttattctctgttctttattttgtttgttctttcaacccatcactgtattgaacatcagttttccaggcaatgtcctagggaaacaaagcttcctgcattcctggagcttgctgtctgtgggggaaagcagacattggccataaaataatacacatagtttattacaattgtcataagtattacaaagaaaaagtacaggtgacaataacagcataacacagggaagctgacctggtctggggcttacggaaagcttttctgaggaagcaacattgaaaaatgggcgacagccatgttctaggcagagggaagagcccatgcaaaggtcctgaggcaggaagaagctctgagactctgaggatgttttaaaaaattccagtcctggccgggcccatttgtccacacctataatcccagcactttgggaggctaaggcgggaggatcacttgaggtcaggagtttgagaccagcctggccaacatggtaaaaccccgtctctaccaaaaatacaaaaattacctgggtgtggtggtgcgcgcctgtagtcccagctactctggaggctgaggcagaaggagcacttgaacccaggaggcagaggttgcagtgagccaagatcatgctattgcactccagcctggcaacagagtgagactcagtctcaaaaaaaaaaaacaagaaaaaactctcagtccttgctgtggacttgagaagaatgaaagagagagaggagatgggatagagagatggaggcaggggtgcaaccctgcaggcccttgcatgcattataaggattttggacttttatcttcagagcagatggcatccttgagaagaatgcttagtgtaactcataagagcgtgaactctgccactcactagctgtgagaccctggatgggtggctgaacctttcagcatcttgatcttctcatcggtaacagaagaacaaactagtgcctatgtcatagggtggtttttaggattaaatgagttgctatatgtaaagggcttataacagtgaatagcacatgagaatttacaatgacagctgaagggtttttttttttttttttgacagagtctcgctctgtcacccatcctggagtgcagtggtacgatcttggctcactgcaagctccgactcctgggttcatgccattctcctgcctcagcctcctgagtagctgggactacaggcgtccgccaccgcgcccggccaatttttttgtatttttagtagagacggggtttccccgtggtctcgatctcctgacctcgtgatccgcccacctcggcttcccaaaccgctgaagggttttcatcaggccaataatgtgataagatttgtggtgcttcaagaaatcactctcactactgcacaagggaaactagactgcagaagagacactagactgtggaagggaaagtagagtgaaggcagagagaccagtcagaagattacagctccccaggagtaggatgatggcagctcagaccagggcagaagcagtggatgtggaaagaggatggatgaatagacttggtgaattgtcgggtttgtgtgctagggctgggggaagggagtgggcgtgaggcagcagaggagtcgaggatgcttccaaggtttctagtttgggcatcttggtggttggatagccagttttttggtggaaggtgatgaattaaattttggacatgctgaatttggacatgtgagatgttaaaatgaagatattgaacagggagacgagacgtggggctacagataaaaatttaggagccactaacctaaagatgaccaataaaaccatgggaagaggccaggcaccgtggctcatgcttgtaatctcagcactttgggaggccaaggcaggtagatcacttgaggccaggagtttgagatcagcctgggcaacatggcaaaaccccgtctctactaaaaatacaaaaattagctggttggtggtgcacgcctgtggtcacagctacttgggaagctgaggtgggaggatggcttgagcccaggacattgaggctgcagtgagttgtgattgtgccactgcactccagcctgggtgacagagccagaccctgtctccaagcaagcaaacaagcaaacaaacaaacaaaaaacaccacgggaagagatgaaactactcagaaacagtacatggagtttggagtttggagtcctatagacttgggtctgaatctccccaccagctagccatatggttttaggcaagttatttagcttctctgataatcagtttttaatctgaaaaatgagaataattatacctatacccaagggttattgtgggaggtaaatgagacaatatgtataaaacacctggcacggagctcagtcaatattaatcacttttcttcttttatccttccttcctcactcatcacatacatttttttctaccttggtttctaaagccttctacattcgagtacaccaggcctgtgttcacctgttacccaggtgctgaacccaatgtagtgcatgtccagattggaacctggctgccccaggcaagggtgccacacacaggagagtgagtcatgttgtgaaatgaacactagtcttcaggtcaagtggaccttgattcgagtctcatctctgcttcccacttgcttgggatctcaggtaaatcaatgcacctgccagggcctcaggcattcatctgcaaagtgaagcatcaggtgattctgctctgtattaatttgctagggctgcggtaacaaagtgccacaagcggggtggcttaaaacaacagcctcggccaggcgcggtggctcacgcctgtaatcccagcactttgggaggctgaggcgggtggatcacgaggtcaggagatcgagaccatcctggctaacacggtgaaaccacgtctctactaaacaaaatacaaaaaattagccaggcgtggtggcgggtgcctgtagtcccagctacttgggaggctgaggcaggagaatggcgtgaacccgggaggcagagcttgcagtgagctgagattgcaccactgcactccagcctgggcgacagagcgagactccatctcaaaaataaataaataaaaaataaaaataaagaaaaaacaacagcttcgtattctgtcacagttctgaagactcgaagtctgaagtccgcaggaccatgctcctctgagactctgggaaggacctttccttgcctcttcctggcttttggcattggccagcaatccttgccattccttggcttgcagctgtgtcactctagtctctgcctctgtggtcacatggcatcctcctcttgggtgtctgtgtctcttctcttcttataaggacactggtcatattggattaagagcctaccttactctggtatgacctcatcttgactaattatatctgcaatggccctattcccaaataaggttacattctcagttactggggttaggacttcaacctatcttttttgggaacaacccataacatactcctagtatatttttttcctttaaatctgtagaaagtaagaaaaaaaatctctccagagaaaagaactgtggaacgttaattatattttcatttgttgttagaaaacagttttctgactccttggaaatatgtgttttctctgttaattatgatctccttgtggcaagtaatcattgcaggtaaaagctctttctcatttagagaacaaacacaaaggcaagagttggaccctgctacatctggggagaagagatttgtgctaaattggaaaatacaacccttttctcccttctttgttctctgacacaatttctttctagggtgggggcattaccgggggtggggaaagtttgctttctctgtttccgttaaactggacctctagaaatcatttgccttctcctgataggggcagcggtacacctttgccttcctgcttcaaggacaatccagtgtctgggtgtgagagactctgatggtctctccatttcataaaatatcttaccggtcaactcccttgaagaagtcatgcctgtggatgctggaagttaataaagggcccatgtccaggaggtcctggtcaccaaaaactcatggccaatcacgctccttaatatttgctcaaatgagttgaaaagttaggtccagacaaaatcctatgcgtggatgtttaccgcagctttattcataattgccaaaactggaaagcaaccaagatgtccttcagtaggtgaatggataaacagcctgtggtatatccccatgatggagcatcactcagtgattttttttttttaagctatcaagccacaaaatgacatggaagaatcttaaaggcatattgctaagtgaaagaaaccattctgaaaaggctacatagtctgtgattccaatgatatgacattctggaaaaggcaaaactatggggggagtaaaaagatcagtggttgccaggggtttggaaggaggcaaggagggatgaataggtggagcaggggcatttttagggcagtgaaactattttgtatgatgctgtaatggcaggtacatgacatttgccaaagcacatagaatgtgccacacagagagtgaactctaaactgtaggctttagttattaataatatattagtattcattcatcaagtacaacaaatgtactacactaatgcaatatattaataataggtcaactgtttgcagggttcatgggagaaggagagggaatatatggaagttctctgtactttctgttcacttgttctgtaaacttaaaacgtgttctaaaaaaaaaaactcttaaaaaacaaccaaccaaacaaacaaagaaacaaaaacccctcacaggtcagtcactttggggaagctcctggggtctataagtgtgggacctcttgggatttcccttgtgaggcagaaggtactaatacctaatgcatctcttcacatctgggtggccttatttcaaccagtgcccaccctgtctaaaaggttatcagctttgagtggagctgcaggcaaaaagaggtcctatagctggtccaacagctgtacaagtgaccccaccacttggcaggcctggtggcagatcagcatgctgtttgtagtctggaaaatcttaagaatcctagcagatggtgctaggcagtgaccaggataaggcaagtgagacgcttgcctggggcacgaaattaaaggggttagccaataagctttagccaccaagattttactattttacaagattttccttaatattactattttaagcaatgctttaaaaaacaatgcaaaaaattcgttgtaaacaaaatatccaaactttaaggtgggatccaaccctgcgcttgtgtaacttggccacactcatctcactcttgtcttggccccatcacatcctgcttcaatgtactattttgagattttagtcatcttggcattaatttttattttaaaaattattttggcaaaatattgtttatcttgatgactgagattttgagcaccttcctttaaattttttgctcaaggcaagtgcttgactcatttcactctagtccaggtcctgcccctatgcctctcaatgatcaggttaatatattcattcagtaaatgttaattaagtgtctaccatgtaggtacttggtagacaacataacttgccccatgggtgtccatcctcctcattccctggtcagcccattgttcaagagacttaccaccatgttgccacagcagtatgcatgtatccgacactaagacttcctgggctgtcccctctgctcagtgctggatgttccagcagcagatgtcttcaccaagtcctcaatgaggtgccatagcacactgaggggatctggtggctggttgattaataggtccccatttgctatggaggggaaacaatttgttcttaccagaatagacacatgtcctggattttcatttccattatggcctggcagcatcaccatccatgaacttgtgaaatgtgtcttcatagccacagtgttcccttgggccacagcaagtgcagtgaggaaatgggcttgtgctcacggaatttgctatttttaccatgcagacatgaagtggctagcttagtagaaggatgaagtggcccactgaagactcagctctgccacctttaatgctgggctactcttgtgcaggacatagtagtatatgctctgaagcagcaactagtatctgatgtgttgtcttccatgaccagaatacatagatcctctcccttgactctgagttgcatctactcggagatcctgaattacaccagagaccactgcttgcccaagtcctgtttctctacccagcagtccagcttcccaagctgcattcctgtattgagggcacctaccatttctcactgtctcctccttctggcagtgaggcatatcccccagacttttgggagtagcttggactctagctttaagatggaggacaccagaaccgggacacttctgttgacctcatggtgctcatgctttcccactagagactctgacatccagatcctctatgtagccccatagtttgctctgagtatgctatgtacaggagtataggttgtgcactgcacaagtccataggacaccattcaaatggaatagatatgaacagtgcccttggagctgtgcaatgcagaaggcttgcccgagcagttaggcttaaggaacttgcaccaacatattgaaggaagggggcatggcaaagtgacactggtgcctaaattaatgtggtgataaaacaacaacgacatttatttaatgttttgaagcattgtgcttagccttttacattgatcatctcagttaatccttacaagagctctgttaggtaatattaatatcatcctcgtattacagatggggaaactgagactcagtgaggttgggtagcttgccaaggacacacagctggaaagtggtagagccaggatttgaacccaggaaggttaactccccagcctttgcacatgatccagcactggttgtattgctgacttcatttcaagactgggagctggatccacttctcagaagaacctaagaccttgccaggatcctaaacacgttatgggggaaagagatttagaactaggcaaatgtggatcaaagccatgcttcaccatttaccaatgcaactttggcctcatcccatcatctctctgagcctccattacctgttccaatttgcctgtaattgctagaaggtattgcacacttactggatgtcaggcacagctaagaactttaaccacatgacctccttcagccctttctgataggaccctggcctgcagggacatccacttgagaacatgtgttaaaaggactttcaaagtatcaccatgtgatatggtttggctctgtgtcaccacccaaatctcatctcgaattgtaatccccatgatccccacatgttgagggagggacctgtaggaagtgattggatcacagggatggcttcccccatgctgttccagtgataggagggagttctcgcgagagctgatggttttaaaagtgcttggaagttccccctttgaagcattctctctcctgccgccatgtgaagaaggtgcttgcttccccttctgccatgattgtaagtttcctgaggcctccccagccatgggaaactgtgagtcagttaaacctcttacctttataaattacccagttttgggtatttctttatacagtgtgaaaacagactaatacaccattccatgcacacatgttcgttggcaagagtgacagttgctgagtctactgagccctgacttacacgaggtgttctgctaagtggttacatgcagcatcttggttacccttgcagttactgccactttcagaggcatctgaactgaggctcaaagatgtgaaataacattctgtgggccacaaagctaacaggtggtggggctggtttttttttaactgagtcaggcttattgcaaagcccatgctcttaagtgttgctacccaaaggcctctctggatggtctttcctcacggggccccttctcaaatgctggagattaatttaaatgccaatttgataggtgaatgatggtatctcaatattttaatctgtgtaatgtagatttccaatggtattaactttgctctgtcacccaagttgaagtactgtggtcactgcaacccaggtccctgcatcctgtctcccgagtagctgggactacaagcgtgcaccaccacacccagctatttttttttttctgtaaaaaatggggttctgccatattggccaggctggtctcaaacccctggcctcaagggatcctcctgtttctgcctcccatactgctgggattacaggcatgagccactgtacctggtagcaattaactacttcttcttctttttttttttttttaaagcgaaatcaagtttattaagaaagtaaaagaataaaggaatggctactccataggcagggtagcctcgagggctgctggttggttatttttatggttatttcttgatcatatgctaaataagaggtgaattattcatgagttttccgggaaaggggcaggcaattcctggaaccgaggattactcctctttttagaccatatagggtaacttttggatgttgccatggcatttgtaaactgtcatggtgttggtgggagtgtcttttagcatgctaatatattataatttgcatataatgagcagtgaggatgaccagaggccactttcatccccctcttgcttttggtgggtttcagctagttctttaccacatcctgtttatcagccgctctttgtggcctgtatcttgtgccaacctcctatctcatcctgtgactaagaatgtctaacctcctgggaatgcggcccagcaggtctcagcctcattttacccagctcctattcaagatggagtcgctctggttggaaccccctccattttacaaggcgattttttttttttttttttttttttgagacagagtttcactcttgttgccccggctggagcgcaatggcccgatctcacctcactgcaacctccacctcccaggttcaagtgattctcctgcctcagcctcccgagtagctgggattacaggcatgcgccaccacgcccagctgattttgtatttttagtagagacggggtttctctatgttggtcaggctggtcttgaactccccacctcaggtgtcccacctgccttggcctcccaaagtgctgggattacaggtgtgagccactgcgctcagccattgcaaggggattcttaatcctaagggttgcagagggacgaaggtacatcttctgcagcttctttaggctgaataggggccacgatattcctgcttaactattagggtctctcgtctccagggtagagaggcgctcagtcagacagcattggtatgctgagggccattcataactccaaaatttcaacaaaaggtgatatccaaagtcgaccaattggtgctgcagtctatttcctttgggtcagggttctctccagtattgtccctttgaggtttgctaggaagaggttactggaaagggattctgatctagactccaaaggagggttcctggatctggtgcaagaaagaattcagggtgagtccacagaggaaaacgaaagcaagtttattaagaaagtaaaggaggcagggtgcagtggttcacatctgtaatcccagcactttgggaggctgaggtgggcagatcatgaggtcaagagatcaagaccatcctggccaacatgatgaaaccccgtctccactaaaaatacaaaaattagctgggcatggtggcgcacgcttgtagtcccagctactcgggaggctgaggcaggagaatcgcttgagcccaggaggtggaggttgcagtgagccaagatcttgccattgcactccagcctggtgacagagcgagactccgtttaaaaaaaaaaaaaaaaaaagaaaagaaaatggctactctgtaggcagagcagccatgattaacttcataatgccttttggtcattcctattttaactcctgtggattgcaaggtcgtgtcttttgtccatttaaaaaacgggagtagggtgttgtcctcttcatattgatggagaagaaattttagatcttatgttcttcattatatgacaaatagtattttttgaattttaattttgtttgtggtgcttcctgatacacagaaggtaggcagatgactatagtcaatatatcagtttttcttttttgagtctttccttttgtctttttctcctcttgcttgaaaagtcatacttctcttgatatcagaaaaaatattaatctatattttatcctagtttttcatggcttcattaaaataatagctctttgattgatttgaaatttattttattttattttattattattatttttgagacagagtcttgctctgtcacccaggctggagtgcagtggcatgatctcagctcactgcaacctctgcctcctgggttcaagcgattctcctgcctcagcctcccacttagctgagactacatgtgtgcgccactatgcccagctaattttttgtactttttgtagagatggggttttgccaggttggccaggctggtctcagactcctggcctcaagtgatctgcccgccttggcctcccaaagtgctgggattagaggcgtgagtcaccacgcccggttgaaatttattttgatatatggtatgaaacgctgaactttttcctgccccaaattgttaacgaattgttcctgcattatttattgagcaccccagaaaattccccagtaattaattaattattattattattattttttttgagattgagccttgctctttcgcccaggcaggactgcagtggcgcaatcttggctcactgcaagctccgcctcccaggttcacaccattctcctgcctcagcctcctgagtagctgggactacaggcgcccccacggcacccagctaattttttgtatttttactagagacagggtttcaccgtgttagccaggatggtctcgatctcctgaccttgtgatctggccgcctcggcctcccaaagtgctgggattacaggcgtgagccactacacccggcctaattaattaattattttagatggagtctccctttgttgcccatgctggagtgcagtggcacgatcttggctcactgccacctctgcctcccgagttcaagcgattctcctgcctcagcttccagagtagctggactacaggtgcgtgctaccatactcggctaatttttgtatttttagtagagacagggtttcaccattttggccaggctggtcttgaactcctgacctcaagtgatctgctttcctcggtctcccaaagtgctgggattacaggcataagccaccgtgcctggctgaaattctccattaatttaagtgccactttaatcaatactaaattcctgtgtagactcgggatggttttcaggcttattctttcatagctatgtctattctttgacactgctttaattattataattttacaacccattttatatctggtagatgaaatccattatttatatttttgaaaattttctttattatttaacctcttttattttccattcaaactttagactaatatttttaacttgtagaaactttgtagccagggcgttttttgctttttttttcaagatggaattttgctcttgttgcacaggctggagtgcaatggtgtgatctcggctcactgcaacctccgcctcccaagttcaagtgattctcccgcttcagcctcctgagtagctgggattacaggcatgcaccaccacacccggctgattttgtatttttagtagagatggggtttctccatgttggtcaggttgatctcgaactcctgacctcagagatctgcccaccttggcttcccaaagtgctgggattacaggtgtgaaccactgcgcctggccttttttttttttttttttttttttttttttagttggagtctcgctcttgtcacccaggctggagtgcaatgtccagctctcaactcactgcaacctccgtccccaggttcaagtgattctcctgcctcatcctcccaagtagctgggattacaggtgcccgccacctaatttttgtatttttaatagagatgggggtttcactatgttggccaggctggtctcgaactcctgacttcaggtgatccacccgcctcagcctcccaaagtgctgggattacaggcatgagccactgcgtccggccctagccaggtttgaattgcaattccattaaactttcatatgactttaagcagaaataatccatttgaaatattgttttcttttccttgaatatggtatgttctctaactgtgcagatctttttttatattctccacaaagttttgtcactacttcaaatacttctgcatatatcttttttttttttttgagatggagtttcacttgtctcccagggtggagtgcaatggcgcgatctcggctcactgcaacctcctcctcccaggttcaagcgatttttctgcctcagcctcctgagtagctgcaactacaggtgcccgtcaccacgccctgctagttttttgtatttttagtagaaatgaggtttcaccacgttggccaggctggtctcaaactcctgaccttaggtgatctgcctgcctcggcctcccaaagtgctgggattacaggcatgagccatcacacctggccctgcatatatcttaaacattttatttgtaggttaaaaaaattaatcaatcaatcaatcatttatcaatctatcatctgtcaactgggatcatctcccaggagacatttgacaatctctgggcatatttttagttgtcacaactggaaactagctattggcatctgttgggtagaggccagggatgctgctgtacattgtacaatgcccagggcagcccctacacacaaaaattattagtgtcagatgtcagtagtgcttacattaagcacctgtcatctggcctggtgtggtggctcatgcctgtaatcccagcactttgggaggctgaggcgggtggatcatgaggtcaggagtttgaggccagtctggccaacgttgtgaaaccttgtctctactaaaaatacaaaaaattagctgggtgtgctggtgtgtgcctgtaatccaagctacttgggaggctgaggcaggagaatcgtgtgaacctgggaggcggaggctgcagtgagccgagatcatgccattgcactccagccgacagtgtgagactccgtctcaaaaaaaaaaaaagaaaaagaaaaaaaaaagaaactgtcatctatctatattgtgagtgaagtcttttccccacggattgtcctactgacatagctatcttggtcagtaacagaggagatctgttaagcgtgtgaggggttggtccatgttctctgggtgtttgctccaagccctgggaggagcagcctcctttgagaggcagcatcccttgacttccacagagcccaagaacacgatggtgtgtggcccttgaccgtggctccgcctcttacaggtctcttagagagactaggtgtcccagaggaggtgtcttctggggagagaccaagaagggctgaaagaaaatccatgattccatttaaataaatgtcaagaactggcaaaactcacatctggtgatggaaatcagaggtgtggttgctggggttggggagaggattgagtggaaaggctgcaagggaagttttggggattatttctggcacaatgagcctgggtgatggagagtgtttttccccaggactttttattctttaaagaaggcacaattatagctgcagtaaccccccctctttttttttgagacagggtctcgccctgttgcccaggctggagtgcagtggtgcaatcacagttcactacagcgtcagtctcctgggctcaagtgacccttctgccttagcctcctgagtagctgggactacaggcatgtgccaccacgcttggctaatttttttattattatttatttttggtaaagacagcgtctcactatgttgcccaggctggtctccaactcccgggctcaagtgatcctcctgccttggcctcccaaagtgctgggattaattacagttgtgagccactgtgcccggccatcagaagccccttgatatcctgctctggccccagctcattcccctttctgtctccccagaggcagccaatgtccagaaattgataagttatctttcacatccatgtttttgtattttttcaagcagcgtagtttggtgtgtttttttttcaatttttttattgcagtaaaatatacataacataaaatttaccatcttaaccattttagtatattaagtacattaatttaattactcacctaattaagtaattaaataatttggtatatgaagtccatttagcatattaagtacagcgatattaagtatattcatattgctgtgcaaccattaccaccatccacctccggaagtcctttcatcttgcaaaactgaaactcagtactcattaaggaatgacacttccattcccccagctcctgacaaccaccattctactttctgtttttatgaattttgctattctagagacttcatgtaagtggaatcatatagtatttgtctttttgtgtttggtttatttcacttagcttaatgtcctcaagatttatccatattgtagcatgtgtcagaatttctttcctttttaaggctggataatattccatttttgtgtgtgtatgtagatacacacacaccacacacacacatacatatgcacacatacatacggtaccacattttgtttatccactctttcatcaatggacactcgggtttcttctaccttttggctattgtgaataatgctgctgtgaacatgggtgtacaaatacctctttgggacacggctttgaattctgggtatatatccagaagtctaattgctagatcatatgtaattttatgcagaactgccatattgttttctacagtggctgtatcattttacattcctaccaacagtgtacaaaagctctgatttctctgtatccttaccaacacttgttttctctctctctctcttttttctttttttgagacggagtcttgctctgttggccaggctggagtgcaatgacatgatcttggctcactgcaacctctgcctcccaggttcgaagtttcaagtgattctcctgcctcagcttcccgagtagctgggattacaggcacacaccaccatgcctggctaaattttgtatttttagtagagacggggtttcaccatattggccaggctggtcttgaacccctgacctcaggtgaagtgctgggattacaagtgtgagccaccgcacctggcctctctcccctttattaatagtagctatcctaatgggtgtgaggtggtatctcttgttttcaatttgcacttccctaatgattagtgatgttgagcatcttttcataggcttattggccatttgtatatcttctttggacaaatgtctactcaagtcctttgtctgtttttgatttgggttgtgtgtttttgttgcttactgagtagtgtgtttttaaacattactcttaaagtatcacattgtgcatattttttctgcattttctttttcacttaatattctttttaaatttttttcaagacaatgtctcgctctgtcatccaggctggagtgcagtggtgcgatcttggctcactgcaaccttcgcttcctgggttcaagcgattctcctgcctcagcctcccaagtagctgggattataggtgcccgccaccatgccaggctaatatttgtatttttagtagagttgaggtttccccatgctggccaggctggtcttgagctcctgacctcaagggatctgcccgcctcggcctcccaaagtgctgggattacaggtgtgagccaccgcacccagatccacttaatattctttacttaatttattttaactgctgtataatactctactgtgttgcatacttctcttctccaatcttctattattggacatttaggtggtttccaattgttcagtatgacactgcttcagtgaacatcactacttgtttgtgtatatttattttttatacagtcataatattgtttttcagttggttctcttgtgttctctagaaagacaatattatcacaaactgaaaataatacttttgttgctttctttcctgtagttatgattcacatctatttctggtctggtacattgcttagaaatttcagaacagtagtaaacagcagtgggaacagtgactatccttgttttgttcttgacattaatgaagttgcctcctgaatttcactgttaaggatgactttggcatttggtttgaaatgttaatttttatttatcatcttgaggtattatttttcatttgaatttattaaatgaattttatagactaatttaaatattattatagtttttttcttctacaaattgttatagtaatagacttctaatattgaaacaaccttggagttttttgatgtattattctcccagtctattgcaggattatgtttgcttgtatctttttagtatttttgtatgtataacatattaagagtgattggcctgtttttgttgttgttgactatcttttaagtcacagttacaaggttttgtctttcctaataggacattattgagatatcatttacataaactacacacaccttaagtgtacagcttgatgaattctgacaaatatgtatacctcagtcaccatcatctagatcaagatatagcacattttcatggtcccagaacatttcctcatggcccctccagtcaatcttcgatccacaccccagcaaccacttccctgatttctatcaccagagattagttgggtctgtcctgtccttgaacttgtcctatatatgatcatatagtttgtattcctcagtatctggtttctttcattcaacataaagtttttattaaaaaattaaaaaaagttttttaaatttgttttttggagatggagtcttgctatgttgcccaacctggagtgcagtggctattcacagacgtgatcataactcactgcagcctcaaacttctgggcttaagtgatcctccagcctcagcctcctgagtagttgggactacacggtgcctggctgcataatgtttttgagattcattgaaaatattatatcaattgttttgctagctttgtaaaatgaactgataagatttacatctttttggccaggcatggtggctcatgcctgtaatcccagcattttgggagtctgaggcaggaggattgtttgagcccagaagatggaggctgtagtgagctatgatggtgccattgcactccagcctgggtgacagggtgagaccctgtttcaaaaaaaaaaaaaaaaaaagatttacatctttttcttttcatgccctgaaagagctaatgttacaaaatttatttgttttgtgaaaggtgaggtaactcacctgtgaaatcatctgaggctataaccattttaggaggcaatactttaagaactttctttaaacttttcctttattattgttctattcagatagtctagtttttgttgaagcaatttttaaagcaattttttaatgttatgttttcccagaaaataatccatttcattgcagttttgaaattataagcatataattgtaggtagagtcctcttagagttttaaaacctatagtttcccttttggcatttataacatttattcgtgttttttcctttttctttttttttttttttttgagacaaagtctcgctctgtcacccaggctggagtgcaatggcgcaatctcagcttactgcaatctctaccttctgggttcaagagattctctgcctcagcctcccaagtaggtgggactagaagtgcaccaccatgcctggctaagtgttgtattttttgtagagatagagtttcgccatgttggccaggctggtctggaattcctggcctcaagtgatccacccgcctcgtcctcccaaagtgctgggattacagatgtgagccaccatgactggcctgtttgtgtttcttctaaaggtagaagcaaagctgtttcatgaaccaactctaaaatttatttattaatcctactgtctttctgactgttaaggttactaatcaataatatttgcttttaactgttttactgctttcttcccctggttattttgatgttttattaaaaccaaattacttaaatgaaagtttattttacctatttttattcttttctgattagccataaaggccatttaaggctacaaatttgcctatgaatcagctttgtctcatcccatgagatttcttatatgttttctcttttccattgtttttaactagtctgtttgccgctttgatttttgctctttagctcaaatgttatccaggagagcacttaaaaatatctaagtgattgggttgtttaatttgtgtgataggaaagaagtgtttattatttagaattctccatggcttcctagggagggtggttcccatctctttagcatcgtttgtgttatacacagcagtgacagatgtaggtgtagaagctttaggggagctcagtctgagtccaattactcagcataaaaaagggtgcaagatggatgccttttcagagctatcagggagatgtgagaggggaagggtgcagatgacttgtgactaagacacgggaaactcacagaatttcccgtgtaattctgtgacccaaaagtaaatgggtccagttggaagttggaatgtgggtaggaagggagctggctgagagttaattttggaatagcatattggaatgagcaagatttaactgctttacttgtatagactctaacctgtagacagtgaggaatcatttgggatttcttgcatgcaagtgacgtgattgagatttattctcaatgttaagatcccattcacctcccagaatgctggtagccaggcagaagatggaaagattcttttttggagcatatgacaagcccaggagtagagccctaaagacactgacattggagtcttctcaacaaaatgtcctgttcagatctccttgtatgactctttgttgaaaagctcagaggtcccaatcaatttttagtgtctcagtgtttaatatgagcagaaaaccaaaggtcacttgacatttaagtaaagcctctaccatgaaggacagagacaaacaaataagcaaagaaaagaagcaacctagaggagttagacgatgcagggagaagaaatcttaaaagcgttaacattctcagagatacaacacaagatagaaagatatggcattcatgaaacaagtaaggaatgctgatgaaaagaacacacagaattcagagaacaataaaacaccagaaactcaaagaaattaaaagcaaaaaatgctcaaacgtgaacaatttaccagaaggattgaatgataaagttgagtcaatatttcaaaaagaaagtgatatctacaaaaaaatggaaaacagaagagaaaaagataagaaaaactagagaaacagactagggcgtccaacatccaaaaaacaggaatttaagagtgaaagggtacagaaaatgaaagggcaaacatcatcaaagaaataatttaaggaaaatttctagaactgaaggatgtggaattctagattgattgagacccatcataatgctcaataaaacagacctgcacctttgaaaagagaggtttttttttaaagaattatgcatctgaaatttctgttttacttagaagataattagtgctaaaattgaagaatacaagttaactttattttttatttattaatttttttttgagacttgctctcgtcactcaggctggagtgcaatggcatgatctcggctcactgaaacctccgcctcctgggctcaagcgattctcctgcctcaacctcccgagtagctgggattacaggcgcctgccaccacgctcagctaatttttgtatttttagtagagatggggtttcaccatgctggccaggctggtctcgaactcctgaccttgtgatctgcccaccttggcctccgaaagggtgggattacaggtgtgagccaccgtacctggcccaagttaactttaatggcaaagttggagaatacaagataacttgtgatttgcatgtggccagactgcatataaaaggacctctggcagcatctgtaacaaagtggactggtgtgatgtcaaagaaatagacattcctataatgaaagaatgtcatgtagaaatgtagcatcctaatttttaaagtattttagatttggttgggagaagaatctgtcacttacaaaataaggaggaggaaaaaataaacaatttagctttttttttttttttagagctatacggtttacaaagtgctgtggcctatatgtgataaactatttaaatttatctttttttctcagaacaatacgaacatatcaattaatcttaacaatattgcaagtgaggcattatgactcccatattgcagacaagaatgaggctcagagaggttaagcaaattgtccaagttcatagaatttgcaggtggcagaggtgggatttacatggcggtctctgattctcttggcctgttccttatcatcaccacgaggtcacaagatggttgaagaaggaagaaggagaaagggtggcaaacaaagggcaaaaaagaatgtgtaccagccctgccttttgtgacatctctctgaagtccacccagcagcctcttcttaagtatcatttgccagactatgctatgtggccacctctcttggcagaggaagctgggaaatgcggcgttttaattggactgcttccttgggtgaaaccaaagctctgttaggaagaaagatttgagttggcagccaggagtctctgtgaaagccaggaacaaaagcagctaaggtatccctttctttggctagctagaagctgtttacatggatagcctttttttcctccccccttggctttggataatgtggattattttcatgcagtagaaccaaattttcaatatagtgcatgtatttaatatttcaatatggcgagttcactggctttttctgtcttcagacaagatttttatgatggtcccaaatcctgttaagatttgatctgagttgttttgctaaatagcactcagtgttttaagctccctgaaagtggttacccatagttttctaggcttttctttctgtgccctcttccccaggaccatttcccctctgtcctctttcccaggaccatttcccctctgtcctcttccccacttcccattctccttctccaccagttcaattgctgtcaactcttactgaaatctcagctcatgcaattccagagagaatctctagttcaacgagttggggttgcagacagggaaactgaggcccagaaagtcagggtgatctctggcaaggactaatgtcctctggctctcctcagtcttcttgaaggaaggtcagtgattcttactcccaggaggaaagacagagagcgaaggccctgaagtaggaaagagactaggggcattaaaggaaacaaaagggggctggcatggctgcagcacaggtagtgaggaggagattggcttgagccaaagctagaagggtcctcaggaccatgggaagccaaggcatgcaggtgatgctgaggatatggggtgtatcggcttctgaagggtatcagctgggaaatagtgtaatttagcttaaaatcttaaagggtccttatgcctgcttcatagagacatattggggagggcaagaacacaaaagaggagaagagtgagggctactacagttgtcctggtgagagataatggaggcttgaactaacgtagaggcagttgggttggagggatgagtggatggacgtagagtatgttgtcaggctttgatgacagatttggggatgggagtttgggagaggggaaagggaaagaatcctagggttctgtcttgtgcaagtaagtagatgaaagagcgcttcatggaattagggagcactgggggaggaaaatattggagtggaagatccaaaattcacttttgtgctgaaatttctgtgatacattcttatggagatgtcagtaaggtagctagatgtatatcatgaaccagatttttctgttttatttctaattggctattgttatatatagaaaaactgttgcttcacgcaaatagatacttttttttctgagatgatctcactctgttgctgaggccggagtgcagtggtgggaacatggctcactgcagcctcaacctcctgggcttaagtgatccttaaacctcagcctctctattagcctggactataggcatgcaccaccatatctggttgatttaaaaaaattattatttttttttctgtagagacgggtctcggtatgttgcccaagctggtctcaaactcctgcattcaagcaatcctcctaattcagccttccgaagtgttgggattataggcatgaaccattgagtccagctgcaaatatactttgtattagaccattttactggcctctcttgttagtttgaatagcttttctgtgatttttttggtgttctcatatgtaattatattgcctgctaataatgataaatgtatttcttcctttccaaccattttaccccttattatttttcttgttttatcacattggctatagtagaggtccttttgaagttagcttttttaatgtatataattttttcttaaaaaatatggaatgcttcatgaatttgcatgtcatcattgtgtaggggccgtgctaatcttctctgtattgttctaattttagtatatgtgctgccaaagcaagcactacagttagttttaatggtaaacataatattgatatttgaccagctaagaggaagatgattttgagacaaagcttcgaggcagtgtatacagctcaaattatgacagaagcttagatgtggtgtgataatacatttgaataaggtggtgtcttagttcttgctgctgtaacacaatgccacagactgggtaatttatattgagcagaagtttattggctcatgattctggaggccaggaaatccaagatcaaggggccggcatctgacaagggccttcttgctatgtcatcttatggtgggagggcaaagagagggcgagagagggagcaaatggtcaaactcacagcctcaaacccttaaattcattcatggaggtgaagccttcatgactaaacacctcccatgaggccccgcctcctaacaggccccacctcctgacactgttgcattgaggattctgtttccaacacatgctttttgggagacacagtcaaaccatagcaggtgataactgaagacataaaaagggatataaataccaactctcttaccctcatactcatagccagaagaatggtctgtccataaaacatgatcacaatgcttcaaacctgaagcatggtggtcaaattgacaggaaactaagaatatctaaaagtaaaggttaaagttgggtagagtgtgttcatttggaaaagagaacagagaagaaattgatcataattctcagtttatgaacacctgtaaaaaggtaggatgaaaagaaatagacagataggtatattttaaaatcagtgtccatggttgaagcttaatcttccaaaatatcctgtaacaactataatttatgtaatgctagtatgcatataacatatcacttggtttccccatcacctcagtgatataggtagtaattcacatttatccatagtttgacattttctaacatgcttagattacctcatttgatgtttacattctcagggcttgctcccttgcaattaaggctacaataaaaatccatctgcttttagttctttgaacgcaatgtcctgcattctctctactcggcctttgtccatgtggcccaccttgtgatgcctgtttctccttcacaacccagttcagccccaaggaaaggcctctgttccattgtcagaagggagaggtgagtgtagccagccaggccttgaaggaattcaagccaggtagcaggtatagcacaactcaaatatgctgccgtaagctttgctgagctcccttgctttagggaagaaaagaaaaagaaagtcctctttagccagctgcatttcttcttcccatttccagagtgtaccagggagggtacacatgtgattgtccatgggctcacctttacccatcactcctctggggcagatgccaaatcatgtgtctcgtgatgcaagagcttcatgggggtggagcagggttgggtgctgtctaagagggaatgaatggcccaaagctccaggtctggacagtctgagaccctcttgctggggagtagcgttttgggaaaaatgaaatacacttggctggatctgaaactttctgtagttaggtctggttgggtggaaggggatcttgggtggccttcaagccttggagacccccaatccaagatctctaaggacgtatacctagaaccttccagcttatctgcatcgtcagtgtttctcactcttctgtgcatgccccaagttgtctctgctgtcaggctgcaagattgttgtggaaacaggctgagcctattccatcttgctcagtcacagggccttgtctggtgcctggcacacagagggctgcagcaagtgttggttgatttgaaatcacagttgagcctcctgcctcagcatctcagtcagtgctccatagccagtcacgtggctgcctacaaaggagaagaagataaaagaatcccaggtgactttgtgggttaaaggggttttaaagctcttgctttagaagctcaagtaaaactttcatcctgtgttgactggataaagcattctgtcagccatccggggctcgtctaggactgggggcaggggagaagggagagcaatgttgtcactttaattgcattggcataaatatttgatattcaataaattagatctggagcaaggaaaacattcttgcaaatggattttttacctggagcccagccccattagcagaggagtagagggcagcctgccccagggccggtaattaactcaagtggagcagaactaagcatttttgacagccttcctagtctggaattaactgtcatcttggagggagaaagaaagtacactgtcacattacgggcttatgagaggttctccagtgctgccagccccctgagtttacttatgtctccccttcatgccctgcaatgttattttcatcattagagacaagtttaaaagcaactaacgatgtattttatatccacgtaccagaatcacagatttcaccaaaagagaagacattagcatggtaattcaatttttttttctttttggcagttgtaatgaaacaagatacagtggatgctgttagaagtcacaacactgatatctggagatagtacaagctggattttttttctcctctctgtatcagcacttgcctgtaatgagcatagcttagccactgtctgtgctatctccccccgcccccacccagcgtttatgaaagtagcaattgcttctgagaaaaggcaaaaccgttggagcctgaagctccttctagaagccactgcttgtcttgttccgtggaaactgatactgtggaaattggagttgtgccgggtctggtcctggcaatgtgtgcgcaggcaattttttataaggttgcagatctcagccagactctcagctaggctgggtgtgaggatggcgtctccagcgatgctcagctggcttcagagggaagggctgcctgtgcatttgtatgtgttgagaggggtgagctgtgcagcctggtacacagatcatgaacatctgcttctcttagatcttctgcctactaccacagcagtaaaaccacgactcaccgccttcatcactcagcctcaacactgcttccctcatgccctacagacaatgggagctggaatcgcccttgatttcccctttctgtcatcttaagcacagtggcctgaggctgaccctcctcttagaacttgaccctcttcctctgtccggcaccactccctgcacagtggtaagtctgaagatgtgatcatgttccttctctgcttgaaagtctcctcagctttggctttcttcttgatgccccagcaggggccccaaaacttggctgttcattagaatcttggagacccaggctggctggaccagagtccacagagttcgcgctcaggcagtgcggagggcaacccatggtttacaggatcaagccctaaaatcttagcctaacatctcagcctcaatggcctcctcccctttgggccccagaaggcacggggctcagccacaatcctcaaccatgcacactgcccctcaactcttcccctggtcaacttccacttatcctttaggactcagtgaaatgtcacctcctctgtgaagccttccctaatttctcaggcagaattatggtcattcattcattcgcccattctcattcagcaaacactcgcaggatgcctgcaggttccacgtcctgtgctgggtcctgaagatgacttagcagcaaaaggacagatgccaggagcttttctgctagtggggaatacagaggagacacgagcaaagcagacagaatcaggggaggcttcctagaggaagtgacacatcagggtgatctgaagggtgtgtatgagttagccacaggagtgagggtggggagaggggaaggccttgggtaggaagagagtgtgttagaggacaggaacggtgagaccaaagcataaacaggccaggttccagccatctccccgcagcatgtggtgtgtctccagtgggagagtgctcagtaggtttttgtttgtttgttttttattttattttatgtttctttagagacagggtctcgctctgttgtccagtctggagtgcagtggtgcagtcatagctcactgaagcgtccaattcctgggttcaagtgatcctcctgcctcaggggcccaagtggctgggaccacaggtgtgtacgactgcacccagctaatttaaaatttttttataaagacagggtctcactattttgcccaggctggtctcgagctctggcctcaagtgatcctctggccttggcctcccaaagtgctagaattacaggcatgagctgctgcacccagcctcagtaggtgctggtggagtgtaaagtcaagcgagagggccagctgtgggcagtggtggacattgaggtagaaagccaatgtcagggatgggacaggatattccatccattaagatataggcgatggggtgtccttgcactttaaagatatatacataagtttagggccctgtgaggctggtattattatttccatttcacacaggtagaatttgaggttccaaacagttaactgacatgcccatggtcattcagctagtaaggggcaaagctgggacttgaacccaggcagggtggctctggagcctgtgcttttaacccagactgtcccatgcagctacagcctgacctggcttctcaccagagctggtcgttcctctttcacccgctcaaccagcccatgcctggctcagggctgtttcccggcatctgtgggacatttgaattttcaacgatgacgttcaagagggaaacagaatttttgtaaagagagttcagaaccctttgagagaatgacatgagacctgtggtagctgttgcattaccttcaggtgttggggaaatgcaagagtagtcagctgccctcctgagagccaggcctggggagagcacagttcggcaccccccttgttgctgctgggctcccaaatgcttggggagcattttctgtgctctgtccatgtcagcaccatattttattaagacattattggctgggcgcggtggccggccaacatggcgcaaccccatctctactaaaaatacaaaattagccaggcatggtggtgcacacttgtaatcccagctactcgggaggctgaggcaggagaattgcttgaacccagaaggcggaggttgcagtgagccaagattgtgccactgcactccagcctgggggacagagtgagactctgtctcaaaaaataaaataaaataagataaaataaaataaaataaaataaaataaaatatatatacccatttaccaccccccagatctagatatagaacatttttagatttccagaaagttcccttgtgcccccttccagtcaatctctgcttcccaccgctaggtaaccactgatttctatcactataagttatcagctttctatcattatatgttaaatttgttgtgcctgtgcttgaacttcgtatgataatcataggcatatactcctattttgcctggctttatttgcacaatataacgtttttgagatgcatccagtgttgttgctggtggcagtagactgttttttctcattgttgtctatagtattttgttgtaggaatacatgcaatttctccattcttctgttgatggacatttgtgtggtttccagtgtgaggctattaggtataaactgccacgaacattcccatgtagttgtgtctgtggacaggccgtgcttcagttttgacagtccaggtgatagtggaactttcatctcttcagctttcactcctaaagactttctaaaaataccctcatttgctctctctctacagatgggtgagggaagaataaaagcctctaaggaacagaggaaaaagttcttgctgggagatggacattagtgcatcagcaaatctcatccactctagctccacaagctttcttttttttttttttttgagatagagtctcgctctgtcacccaggctggagtgcagtggcacgatctcggctcactgcaacctccgcctcccaggttcaaggaattcccctgcctcaccctcctgagtagctgggactacaggcacctgccaccacgcccggctaattttttatttttagtagagacgggggtttcaccatcttggccaggctggtcttgaactcctgaccttgtgatccacccgcctcggcctcccaaagtgctgggattacaggcgtgagccaccgcgcctggccaacaagctttcttaaatgtgtccgcttgtctctgttttcccagctcccactggggatagggccatgtccatttcttccctcctctctgatctggtctactcaattctacacttgctacccccccagtttattctaaacatgagagccagggaagtcttttcaataccaaccaacccccaaccttccatgtaccattaaggccccccaaagcttccttctaccttaggagaaactttaaattccccatcctgcactctaggcctgacagcacatagttctgcctacctgccctgcctcctatcccttcccacaagctccgagtctttgcactggctgttccctctgcctggaatgtgcttcccaagggaatctgcatgacacaccctgtcaggactcttccaatggtacctctgtagagaggccttccctgatcacccagtcagacatagcagccctttcctctaacccactaatctgctttctgtctctacaaatgttcctattctggacattttatatgaatggaattatacaatatgtgactttttgtgtttgccttctttcatgaatcataaagttttcaaaatccattcatgttgtagaagaactcagtactcaactcctttttatgactgaataatattccattgtatggatataccataatttattcattcatcaatgggtaggcactgggttgttttcatttctttgattattatgaatatgcttctatgaatatttgtggacatgtttttatttcaacatgttttcactgcccatggctgtttaattagttcaattgctcagtccctctatgtttagttttttcaggaactgtcaaacttctttcccaaaacagctgcatgattttacattcccgccaacaacgcacaagtcttccaatttatccacatccttgctgacatttgttattctctgtctcttggattatagccatcctagtggatgctaagtagtatctcattggggttttggtgtacatttctctcataacgaatgatattgagcattttctcatgtgtttcttggccacttgtatatctttggatgtctaagcctttcactcattataaaattggattatgtgtcttattattgttgagttttaaacatatttgatatattccaaatactcttcccttataagatacatgatttgcaaatactttctctcattctgtgagttgtcttttcactttcttgatagtattctttggagcacaaaagtcctaattattattattattattttttgagacagtctcagtgtgtcgcccaggctggagtgcaggggcgtgatctcggctcactgcaacccctgcctcctgggttcaagtgatccttccgcctcagcctctgaattagctaggattacaggtgcatgtgccaccatgcctggctaatttttgtaatttttggtagagatgggtttctgccatgttggtcaggttggtcttgaactcttgacctcaggtgatccttccaccttggcctcccaaagcactgggattacaggtgtgagccactgtgcctggccaaaagtcctaaattttgatgaagtctaatttatctatttttttcttttgttgctagtgcttttggtgtcatatctaagagattcttgtctaatcctaggtcacaaagatttctacctaactttcttctaagaattttataattttagctcttgcatttagatcttgcatccactgtgagttaatttttatatatagagtgaggtaggggttcgattaattctttttgtaaagaaatttttttggctaattatcctagcaccatttgttaaaaagacaattttaccccctctgaaattgttttgacacttttgtcaaaaattaattgatcataaatgtaagggtttatttctgatctctcaattctattcttttggtctatatgtctatctttatgaaagtctcacactgttttgattactgtagctttgtaatatgttttaaaattgggacgtttcagtcttcgtactgtgttcttctttttcaaggttactctgcttattaaaggtctcttgtatttatatgttaatcttaggatcagtttgacactttttgcagaaaagtctgctcggattagattgagattgctttgaatctgtagagcaatcaaagaattttgccatcttagcaaattaaatcttgcaatccataaacgtggacgttttcccatttgtttaggtgttctttaaatcttttcaaggatgttttgtaatttcagtgtaaaagcctaagtattttattttgttgctatttgaaatgaaattgttttttaggtttcattttctggttgtgcatttctagtatatagaaacaaaattgatttttctatgttgattttgtatcctgcaaccttgatgaacttgttcaattattttgtggattccttaggattttgtacatacaagatcctgtctcctgtgaatacaggcaattttacttctactttggaaaaatggatgccttttattattttttcttgtctgattgtcatggctagaccttccagcacaatgttggacagaagttatgagtggagacatccttgtctttttcctgatcttaggcataaaatttgcagtcttacaccattaactatgatgttagctgtggatttgtttgtttgtagatggcctttaccagattgaggatgtttccttctttctattttttttttgagttttttttttaaatcataaaaggtagttggattttctcagttgctttttctgggtcctttgagatgatcgtgtgttttttgtcctttattctattaatatggtgtattatgttgattaatattcatatgttgaaccaatcttgtattcctgggatacatttcactaggtcatggtgtataattcttcttataagttgctagatttggtttgctagtattttgttgaggatttttatgcttattcataagggatattgatctatagttttctttattgtctgatgtctttgtctagttttagtatcagggtaatattgatctcaaagaatgagttagaaggtgccccttcctattctttattttggaagagtttgtggaaagtcggtattaattttactttaaatgttgggtagaactccccagttaagccatttggtcctgggctttggtttgtgggaagtgatttgattattaatttaattgctttatttgttatagtttcattgagattttctatttctttttgaattggttttggtagtttttttcttcctagaaatttctcaatttttctctaggttatctagtttgttggtatacaattgttcataatattccattgtaaaccttttttttttttttttttttttttttgagccacggtcttgctccattgcccaggctggagtgcagtggtgcaaacatggcttactgcagctttgacttcccagcctcaagcaatcctcccacctcagtctccatagtagctgggattacatgggtgggccaccacaccgggcaaatttttgtattttttttttgtagagatgggatttctccatgttgtccaggctggtcttgaactcctggactcaaccaatcctccctccttggcctcccaaagtgctgggatttcaggtgtgagtcactgtgcccagcttataaacctttctatttctgtaagattggcagtaatgttacctctttcctgatttagtaatttgagtcttctctctttattttctcttgtcagtataggtaaagatttgccagttttgttgatctttacaaagaaccaacttttgcttttattgagttttctctattattttttattttctgtttcatttatttctgctctagtctttattatttctttctttttcttgtttgggttaagtttgctcttatttttctggtttcttaaggtggaggtttaggatattgatttgaaatctttcttagtttgttaatattgacatttccagctgtaaatttctaagcactgctttagctgcatcccatgtatggtatgttgtgttttcattttcattcatctcaaaggattttctaatatacttgtaatttcttccttttggttttttattgatacatagtacttatatgcatttatggagtacatgtgatattttgttgcatgcataggatctgtaatgatcaagtcagagtatttagaatatctatcactttgagcattggtcactcaggagtgtgttaatatccacgtttgtgaatttttcaaattttcttctggtagtgatttctaattttatttcattgtggttggagaatatactttatataatttctatcattttacatttattaaaccttgttttatggcctaatatatggtctatccttgagaatgttttatgtgcacctaacaagaacaaattctctgctgttgttaggtggaatgtttcatagatgttaggtctagttgtttataggattgttcaaatctactattttctggttgatcttctgtctagttattccatccattatcataatgggttattgaagtgtctaactattgaccttttgtctatttcctccttcaattttgttgggttttgtttcatgtattttggagctctgttgttaggttcatgtatgtttatacaggttgatctccttaatcagaaaatctgacatctgaagcatctcaaaatccaaatctttctgagtgccaacatgactccacaagggacaaattctagtcctgacctcacgtgctttgtgatggttcaacgtacctgtatacaaactttgtttcatgcataaaattatttaaaacattgtataaaattaccttcagactatgtgtacaaagtgcatatgaaacataaatgaatttcttgtttagacttgtgtctcatccccaaaatatctcattatgtatgtgcaaatattccaaaatctgaaatacttctggtcccaagcattttggataaaggatacagcctataattattgtgtagattgatccttttattattataaaatttcctttttcatttctagtaaaatatctttgtcttaccatctgttttatctgatcttagtatagctactacagctttcttttagttactgttttcatggcacatttgtttccatctttttactttcaactcattggtgtttttgaatctaaagtgtgtctctataaatagcacatagatgaaaaatgttttaaaatccattctgtcagtatctgccctttgattggagtgtttaattcatttatatttactgtaattactaataaagtagaatttacatttgtcatttactatttgttttctatatatgttggatcttttgtattcctctatgcatccatattgtcttcttttgtattagctaggtattttcttgtgtaccattaaaaaaccctttttttcccctttactatgtgttttttgaagtaaatttcttagtgattaccctgggaattgtaattaacaacttataacaatgaagttcagattaatcccttctcaatttcaatagcatacaaaaactttaaaaaaataactctattacctccctcctaccttgtgctgtttttgtcatactgattacatctttatatgctgtatgcctatcaatacagtttttttattaagagatagaattggccaggcatggtggctcatgcctgtaatctcagcactctgggaggccgacgcaggtggatcacctgagatcaggagttcaagacccacctggccaacctggcgaaaccttgtctctactaaaaatacaaaaaattagcctggcatggtggtgtgcacctgtaatcccagctactcgggaggctgaggcaggagagtcgcttgaacctgggagatggaggttgcagtgagccaaaatcacacgatctcactccagcccgggtgacagagtgagactccatctcaaaaaaaaaaaaaaaaaaaagatagagtctcattctgtcactgaggctggagtgcagtggcaagatcatagctcactgcagctttgaactcctagactcaagtgatactcctgcctcagcctcctgaatagctaggactacaaatgtgtgccaccgtgcgtggttaattaaaaaattttttggtagaggcagggtctcactatgttgcccgggctggtctcaaactcctgacatcaagcaatgcccatgcctcagcctcccaaagtgctgggatcacaggtatgagccatcacacctgccctcaatacagttttgtaattattgctttatgaaattgtcttttaaaacaaatagaagaaaaagttacaaacaaaaaatgcctatacactgccttttaatttacctgtgtagttcacctttactgatattctttacttcttcatatttattcaaattgttgtgtagtgttcttttatattagcctgaaggactccctttagtatttcttacgtgacaggcctgttagcaacaaattctgtctctttttttttaaatataggaagttcttatttttccttcagtttcgaatgatagttttgctggatatagaatttttagttgacagtcattgtctttcagtgttctgaatatgtcattccattgactttggcatccatactttctgacaagaagtcatctaaattaatcttattgaggatcctttgtatgtgatgaatcacttttctctggatgctctcaaggttctctctttgtctttgggttttcaccatttaattatggtgtgtctaggcatggctatttgagtttatcctacttggagttcactgagcttcttggatgtgtagatgaattttttttgtaacattttggaagtttttgcccattatttcttcaaatattcttatcgccttctcttctctacttctgagactcccatggtgtgtgtgttggtacacttaatggtgtcttacacgtccctaaggctctgttcatttttcttaattcttttgaaaaatttttctcagactggaaaacctcaatggattaatcttaaaggctgccttattttttatctttcctgctcaaatctgctgttaaaattctctagtgaagttgtcattccacttcttatacttttcaattccagaatttccattttatcgatattttctatttggtgagacattattcttatactttcctttagttctttagacatgatttcttttgttttttgaatatatttaaaagagctaatttaaaggctttgtctattaagtgcaatgtctgtgcttcctcaggcacagtttctgttgaccacttctttcctgtatatgggccatactttcttgtttctatgcatgtcttgaaagtttgttgttgttgttgttgttgtttgaaaacaggacattctaaataacatgtgacaactctggaaatcagattcttgcttcttcctagggtttgttgtttttgctgttggttattgttgtcattatttgtttatttggtgactttcctggactaattcttaaagtctgtattttttattgtgtgtgaccactgaagcctctgctcaggttagcttagtgatcagttatcgatcaggcagaaatttccttaaatgtccagaaccagtaagtctcccagtctttgttaaggggctctgtttgcatgctggggcacactttcaatactcggccaagcaatttgtaactctggtttagtcttcactgtctgcttgcagagaggctgaaggtcagccagaggtgagtgcttaggcccttctcatgtctttcttgatcatgtacacagccctacacatatgtatggccttcttttcaaaacccactatggaatttctttctctaggttttccttttaagctttttggttagcttgttgttttcccaaactgttatcttcccttcaggcatgtacaatgttaaataattctgcatattgtttttgacaaaagcccccaaagggggaaaaaagaatgttcacaatggatgaactctgagtcaggtcaaataaagacatggcttgtgagtgggattttgcagggggcttccagacaggtcaaataatgacaattctctgagaatggaggtttaaaggagctccagcccccttctaacttctccaggggctggtaggctattggttattcctgtgattataggctgttaggtttcaaggttactgtgggctgaagagcaggaatgggttgaggtcaagttaaaatgtcacaaagctcaaggttcttatgaagattcattgttttccttcaataaatgctcctcagattgctgtaagctttgatttgtttctagagttctgaaatagttggttctgacaaattctgccagtgttctcattgcttttatggaagaaagaatttttggaagttctcactttgccattttttgataatgtcacttctttgtagacaagcattgtcttctttgtgacatctttttgttttgttttgtttttttttttggagacagagtcttgctctgtttcccaggctggagtgcagtgaggtaatctttgttcactgcaacctctgccttctgggttcaagtgactctcctgcctcagtctcctgagtagctgggatcacaggcacacaccaccatgcctggctaatttttgcatttttagtagagacaaggtctcactatgttggccaggctgatctcaaactcctgacctcaaactcctgatctgcccacctcagcctcccaaagtgttgggattacagacatgagccactagtgcccagtccatcccgtggtttttaatgccactgttaatattctccagccaaataccaccatgcatatcctatatttgaacaaagttgagtttattgaccttgcaacaagagagaccacacacccgggggaactgtgaggcacctcatgagaggtatcacgaaggatccattacaggatttgtgtcaagtgattttgaggaggtttcaaagaagcaaggcttttctctgaagtggaagctttctggaagtggaggaaattctgtgattggatattttaataaatcttgtttagaaagtgggaagaatgaagtgcgattaaagctgaaattggtaaggaagcagcagccaccctcattagctagcatattgggtatagtaggctgaataatggctgccaaagatatcaggtcctaatccctgaaacctgtgaatgctgccttagatggaaaagttgtctttgcagattaaattaagggtcttgagattggggagattatcagggtgggtcctaaatatgatcataagtgtctttataagagagagacagaagaaaactctctctctctctctctctcaggagaaggcaatatgaagatagagacaatggagattttaaaacgttgattggtggagactggaaagttgtggtcagaagccaaggaatgctgacagccaccataaactggaagaggtgaggaatggattctttccaagagcctctggggagggagtgcagacctgcagacacattaattttgacccagtgatactgatttcaaactctgactttcagagctgtgagaaaacatatttctgttgtttcaagccatgaagattgaggtaatttggtatagcagccttaggtaactaatacagagggtgtttgttcatttttgtggtttggacaatgtccttatatttgcattagttaatgggttatagatataatcatgttcctcaaattcatatgttgaagtcctattcccccagtacttcagaatgtgaccttatttggaaatggagttgttgctgatgtaattagttgagatggggtcagtagagtgggcccctaacccaatgactggtatccttataaaaatggtgaagtttggacatagaaacatacacatagggagcacaccatgtgaagattagagttatgcttctataagccaagaaagtacaagaatcttgagaggagcttgggacacattctttcctactactctcagatgaaacgtggacctgaagtcaccttgatctcagacttctagtctcctgagctgtgagataataatttatatttatttatttatttatttatttatttatttatttatttttgagacagagttttgctcttgttgcccaggctggagtgcaatggcgtgatcttggctcactgcaacctccaccccctgggtccaagcaattctcctgcctcagcctcccaagtagctgggataacaggtgtgcgccaccacacctggctaatttttgcatttttagtagagacggggtttcaccatgttggccaggctggtctcaaactcctgacctcaggtgatccacccacctcggcctcccaaagtgctgggattacaggtgtaacacgcttcagatatgagtacagagtggtctagcttttgtcttgctccagtgcagttacataatggccctgtctgatgttggtgttctgcaagattgtttatgtccaacaagaaaacaccagggcccaaccatgggtgccaggtaagcttcccaatgccaggggctgcttttctctttttcactacaaagtctttattcatcagataaatgttcattttaggttgtctttaagggttttaactaatttatttattgatgtatttatttttataacagggtcttgctctattgcacaggagtgcagtggtacaatcatggctgtctgcggcctcaatctccctggcttaagcaatcctcctgcctcagcctcccaaagtagctgggactacaggtgagtgtcaacgtgctccactaataatttttttatttttttatttttttttgagacggagtctcgctctgttgcccaggctagagtgcagtggcgcaatctcggctcactgcaagccccgcctcctgggttcacaccattctcctgcctcagactcccgagtagctgggactacaggtgcctgccaccatgctcggctaatttttttgtatttttagtagagatggggtttcaccctgttagccaggatggtctcgatctcctgacctcatgatctgcccgcctcggcctcccaaaatgctgggattacgggcgtgagccaccatgtctggccagtttgtatttatttatttatttttagtagagatgacgtctggctatgttgtccaggttggtcttgaactcctggtctcaagcgatcttcctgcctcagcctcccaaagtgctgggatgacaggtgtgagccaccatgcctggtccaattctttttctaaacattaaaatattcaatccagctgccgtttattttggagtgggggatggagtgagaagtatgtggcctcaggtagagggcatgaggttcaaagtgattataggggtgttggcgctgaacttgctgaggtcttcatggacctgggtggttgacctggcagcctgctatggtctcaatgtttatgttccccgcaaatttgtatgttaaaatcctcagccccaaggtattaaaaagtagggcctttggaaggtgatttgttcatggaggcagagtcctcatcaatggaattagtgctcttacaaaaaagccctgagagaaacctctcaccccttccaccgcgtgaagacacagcaagaaggtgtcatctataaagtagaaagtgggccctcggggaggagccaagatggccgaataggaacagctccggtctacagctcccagcgtgagcgacgcagaagacgggtgttttctgcatttccatctgaggtaccgggtttatctcactagggagtgccagacagtgggcgcaggccagtgggtgcacgcaccgtgcgcgagccgaagcagggcgaggcattgcctcacctgggaagcgcaaggggtcagggagttccctttccgagtcaaagaaaggggtgacggacgcacctggaaaatcgggtcactcccacccgaatattgcgcttttcagaccggcttaaaaaatggcgcaccacgggactatatcccacacctggctcggagggtactacgcccacggagtctcgctgattgctagcacagcagtctgagatcaaactgcaaggcgacaacgaggctgggggaggggcgcccgccattgcccaggcttgcttaggtaaacgaagcagccgggaagctcgaactgggtggagcccaccacagctcaagggggcctgcctgcctctgtaggctccacctctgggggcagggcacagacaaacaaaaagacagcagtaacctctgcagacttaaatgtccctgtctgacagctttgaagagagcagtggttctcccagcacgcagctggagatctgagaacgggcagactgcctcctcaagtgggtccctgacccctgacccccgagcagcctaactcggaggcaccccccagcaggggcacactgacacctcacactgcagggtattccaacagacctgcagctgagggtcctgtctgttagaaggaaaactaacaaacagaaaggacatccacaccgaaaacccatctgtacatcaccatcatcaaagaccaaaagtagataaaaccacaaagatggggaaaaaacagaacagaaaaactggaaactctaaaacgcagagcgcctctcctcctccaaaggaacgcagttcctcaccagcaacggaacaaagctggatggagaatgattttgacgagctgagagaagaaggcttcagacgatcaaattactctgagctacgggaggacattcaaaccaaaggcaaagaagttgaaaactttgaaaaaaatttagaagaatatataactagaataaccaatactgagaagtgcttaaaggagctgatggagctgaaaaccaaggctcgagaactacgtgaagaatgcagaagcctcaggagccgatgcgatcaactggaagaaagggtatcagcaatggaagatgaaatgaatgaaatgaagcgagaagggaagtttagagaaaaaagaataaaaagaaatgagcaaagcctccaagaaatatgggactatgtgaaaagaccaaatctacgtctgattggtgtacctgaaagtgatgcggagaatggaaccaagttggaaaacactctgcaggatattatccaggagaacttccccaatctagcaaggcaggccaacgttcagattcaggaaatacagagaacgccacaaagatactcctcgagaagagcaactccaagacacataattgtcagattcaccaaagttgaaatgaaggaaaaaatgttaagggcagccagagagaaaggtcgggttaccctcaaagggaagcccatcagactaacagcggatctctaggcagaaaccctacaagccagaagagagtgggggccaatattcaacattcttaaagaaaagaattttcaacccagaatttcatatccagccaaactaagcttcataagttaaggataaataaaatactttacagacaagcaaatgctgagagattttgtcaccaccaagcctgccctaaaagagctcctgaaggaagcactaaacatggaaaggaacaaccggtaccagccgctgcaaaatcatgccaaaatgtaaagaccatcgagactaggaagaaactgcatcaattaacgagcaaaatcaccagctaacatcataatgacaggatcaaattcacacataacaatattaactttaaatgtaaatggactaaatgctccaattaaaagacacagactggcaagttggataaagagtcaagacccatcagtgtgctgtattcaggaaacccatctcacatgcagagacacacataggctcaaaataaaaggatggaggaagatctaccaagcaaatggaaaactaaaaaaggcaggggttgcaatcctagtctctgataaaacagactttaaaccaacaaagatcaaaagagacaaagaaggccattacataatggtaaagggatcaattcaacaagaggagctaactatcctaaatatatatgcacccaatacaggagcacccagattcataaagcaagtcctgagtgacctacaaagagacttagactcccaaacattaataatgggagactttaacaccccactgtcaacattagacagatcaatgagacagaaagtcaacaaggatacccaggaattgaactcagctctgcaccaagcggacctaatagacatctacagaactctccaccccaaatcaacagaatatacatttttttcagcaccacaccacacctattccaaaattgaccacatagttggaagtaaagctctcctcagcaaatgtaagagaacagaaattataacaaactatctctcagaccacagtgcaatcaaactagaactcaggattaagaatctcactcaaagccgctcaactacatggaaactgaacaacctgctcctgaatgactactgggtacataacgaaatgaaggcagaaataaagatgttctttgaaaccaacgagaacaaagacacaacataccagaatctctgggacgcattcaaagcagtgtgtagagggaaatttatagcactgaatgcccacagaagaaagcaggaaagatccaaaattgacaccctaacatcacaattaaaagaactagaaaagcaagagcaaacacattcaaaagctagcagaaggcaagaaataactaaaatcagagcagaactgaaggaaatagagatacaaaaaacccttcaaaaaatcaatgaatccaggagctggttttttgaaaggatcaacaaaattgatagaccactagcaagactaataaagaaaaaaagagagaagaatcaaatagacacaataaaaaatgataaaggggatatcaccactgatcccacagaaatacaaactaccatcagagaatactacaaacacctctacgcaaataaactagaaaatctagaagaaatggatacattcctcgacacatacactctcccaacactaaaccaggaagaagttgaatctctgaatagaccaataacaggagctgaaattgtggcaataatcaatagtttaccaaccaaaaagagtccaggaccagatggattcacagccgaattctaccagaggtacaaggaggaactggtaccattccttctgaaactattccaatcaatagaaaaagagggaatcctccctaactcattttatgaggccagcatcattctgataccaaagccaggcagagacacaaccaaaaaagagaattttagaccaatatccttgatgaacattgatgcaaaaatcctcaataaaatactggcaaaccgaatccagcagcacatcaaaaagcttatccaccatgatcaagtgggcttcatccctgggatgcaaggctggttcaatatacacaaatcaataaatgtaatccagcatataaacagagccaaagacaaaaaccacatgattatctcaatagatgcagaaaaagcctttgacaaaattcaacaacccttcatgctaaaaactctcaataaattaggtattgatgggacgtatttcaaaataataagagctatctatgacaaacccacagccaatatcacactgaatgggcaaaaactggaagcattccctttgaaaactggcacaagacaaggatgccctctctcaccgctcctattcaacatagtgttggaagttctggccagggcaatcgggcaggagaaggaaataaagggtattcaattaggaaaagaggaagtcaaattgtccctgtttgcagacgacatgattgtttatctagaaaaccccatcgtctcagcccaaaatctccttaagctgataagcaacttcagcaaagtctcaggatacaaaatcaatgtacaaaaatcacaagcattcttatacaccaacaacagataaacagagagccaaatcatgagtgaactcccattcacaattgcttcaaagagaataaaatacctaggaatccaacttacaagggatgtgaaggacctcttcaaggagaactacaaaccactgctcaatgaaataaaagaggatacaaacaaatggaagaacattccatgctcatgggtaggaagaatcaatatcgtgaaaatggccatactgcccaaggtaatttacagattcaatgccatccccatcaagctaccaatgactttcttcacagaattggaaaaaactactttaaagttcatatggaaccaaaaaagagcccacatcgccaagtcaatcctgagccaaaagaacaaagctggaggcatcacactacctgacttcaaactatactacaaggctacagtaaccaaaacagcatggtactggtaccacaacagagatatagatcaatggaacagaacagagcccccagaaataacgccgcatacctacaactatctgatctttgacaaacctgagaaaaacaagcaatggggaaaggattccctatttaataaatggtgctgggaaaactggctagccatatgtagaaagctgaaactggatcccttccttacaccttatacaaaaaacaattcaagatggattaaagatgtaaacgttagacctaaaaccataaaaaccctagaagaaaacctaggcattaccattcaggacataggcgtgggcaaggacttcatgtccaaaacaccaaaagcaatggcaacaaaagccaaaattgacaaatgggatctaattaaactaaagagcttctgcacagcaaaagaaactaccatcagagtgaacaggcaacctacaacatgggagaaaattttcacaacctactcatctgacaaagggctaatatccagaatctacaatgaactcaaacaaatttacaagaaaaaaaaaaaaacaaccccatcaaaaagtgggcgaaggacatgaacagacacttctcaaaagaagacatttatgcagccaaaaaacacatgaaaaaatgctcatcatcactggtcatcagagaaatacaaatcaaaaccactatgagatatcatctcacaccagttagaatggccatcattaaaaagtcaggaaacaacaggtcctggagaggttgtggagaaataggaacacttttacactgttggtgggactgtaaactagttcaaccattgtggaagtcagtgtggcgattcctcagggatctagaactagaaataccatttgacccagccatcccattactgggtatatacccaaaggactataaatcatgctgctataaagacacatgcacacgtatgtttattgtggcattattcacaatagcaaagacttggaaccaacccaaatgtccaacaatgatagactggattaagaaaatgtggcacatatacaccatggaatactatgcagccataaaaaatgatgagttcatatcctttgtagggatatggatgaaattggaaatcatcattctcagtaaactatcgcaagaacaaaaaaccaaacaccgtatattctcactcataggtgggaattgaacaatgagatcacctggacacatgaaggggaataccacactctggggactgtggtggggtggggggaggggggagggatagcattgggagatatacctaaggctagatgacgagttagtgggtgcagcgcaccagcatggcacatgtatacatatgtaactaacctgcacaatgtgcacatgtaccctaaaacttaaagtataaaaaaaaaaaaatgcaaataaatgtgaagatgaaaaaaaaaaaaaaaaaagaaagtgggccctcaccagacaccaaatctgctggtgccttcatcttggacttccagccttcagaacgatgagaaataaatttcaattataagccacccaatttatggtattttgctctaggagcccaaaaggatcaagacacaggtatgagtttggcttatgccaattgtttttaattcccctcaagctgacttgtacatagaaatgacctcagaacaaccactcagagcatctggggagtcattcctttcctcttccttgttgtttttgatggaaggaaaagtgtcaggcccattgaagttaccacgtgccatggctgtgagtgccttcactacttggagtaggctcatcagtagacaaccctcccagagctctacgtgcagccggcatctgcgcggtctgttagggtaagtgcagttcaggatcaattatggatgaggctccacagcagatgagtaagtgggctgttgtctactttgaaaaattaatgggatctgattaatacgggagaacagtccctctcttcctcaacccagagaggctcagatctctgtggaagcttgagggtttggcggttggggaggagggagctcctgtgtctgtgggtgtcaggtttgattcataggatcatgctttggaattttctgctcctttgacagatgaggctgctgaattccatcaaggtgaatcaatttgcccagacaggtagaaggaaagagaatagtcaattagtattattttaaaaacttaaaagcttttctcatatggaaaattaaaaacatttacagaagtagagagagatcgatatcatgtagccattctcaaactttttggtcttaggaatgttttataatttcaaaaaattattgaggacctcaaggggcttttgtttatttgaggtgcatctattgatattaaccgtattagacgttaaaactcagacacttaaacatatttattaactcatttaaaaaaacaataatcctattacatgttaacaccagtaacttttttgtttttgacactttatgtctactataagctttcagatgacaattatacgttctccattagatttgcttttatttcatttttattgtagtaaaatatatataacagaaagtttaccattttaaccttcttctttttttttttttttttttttgagacacagccttgctctgttgcccaagctggagtgggcaacaacccatccaccttggcctcccaaagtgctgggattacaggtatgcaccactgtgcctcaccccattttaaccatttttaaatgtacagttcaatggcattgagtacactcccattgtgcaaccatcactgttatccatttccggaaacttttcatcatctcacactgaaactctgtacccattagcaactctccatccgccttcccccagcctcttatgaatactgttctactttctgtctctatgattttcactactctgggtatttcatataagtggaatgatgtcatgtttgttcttttgtgaatgacttatttcacttatcataatgtcctcaagattcatccacatactgtagcccatgtctgaattgccttcctttttgaaactgaatattccttgtatgtgtacaccaccgagtgatcctccattgacaagaggctgtggctgtttccacctttcggctgttgtgaatgcaaacattggtgtacaaagatacgtttgagaccccgctttcagttcttttgtgtgtttacccagaagcggaattgctgaatcacacggtaattctgatgtttctgtttttgaggaatcgtcccactgttttccatcgtgactggagcattttacattctcaccaacagtgtgcatgtgtaccaatttcttcacatgcactccaacacacgttttctgtttttcttaatagcaatcccaataaatgttaaatacattcttaatttaaaaaccccaatatttcccaaacaaaaaaattagtgagaaaaagacattgtattacattttgtaaatcttgaatgcctggcttaatgggcagctggattctcatatctgctttttcatttaatctttgtgacatcacatgctgtgtggcctctagaaaactccacagtaccctcatgggagaaggaaagggagaaacgcaaatgacatgctagtattattaggaaaataggtttttttaaaaaatttttttgagatggagtctcactctgtcacccaggctggagtgcagtggcgcaatctcagctcactgtaacctccacctcccgggttcaagtgattctcatgcctcagcctcctaagtagctgggactacaggcatcgtgcctggctaatttttgtattttttgtagagacggggtttcaccatgttggccaggtttgtctcaaactcttgacctcaagtgatccacctgcctcggcctcccaaagttctgggattacaggtgtgagccaccacacccggccaggaaaatagttttgattttgtggacttcagctttaattatcaactcagggtcaatctcgtttcatctcttctccctcttgcctcccctcttcattagtttggagcaaacctataaccatcagttactatcagcattgcattaggcgcggtcctgtatccttttcctaactgtcataagaaatccactttattagcagctatgagtatctggttgttcacacgaggaaaccaggctttgggaacattgggagattttctcaggttcacactggagaagctgagggcacacaggctggagcccaggtcagatatttattataccgttttctttttgttcttgttgttgtttttctttgagacagagtcttgttctcatgcccaggctggagtacagtggcacaatcttggctcactgcaacctccacctccttggttcaagtgattctcctgctacagcctcctgaatagctgggattataggtgcctgccaccatgcctagctaatttttgtatttttagtagagatggggtttcactatgttggccaggctggtgtcgaactcctgacctcaagtgatccacctgccttggcctcccaaagtgctgagcttacaggtatgagccaccatgcccggtcaatattatactgttttctacacttgacataagaccatgagcactattgggttggccttctgtctgtgtctttttcccactgggactttaggaaaagctcttgttttcctccctgcctccatctctcacatgtgggtgctcttttggtaggtttttgagtagccctctagccaggcctcgcgcaggctcctggacagatagctgaactggatgctgctgtttgaagcaattctggatcatttgtttggactggatctggatcatgagtggagacacctctattcactgtcgaattaatggagtccacacaatgcaggatctgaggtcatccagtcctgactgcctcccaagactgaaaccctctctaaaacactctgcccaaaggtcatctgacctctgcttgtatacctccagtgacggggaactcactacctacctcagcagacagccagaccatagatggtgctcttattgttagaaagctccactcacattgcataacattgcaggaacaacctggattcacgctgtggtgggaaaaactcacactgggagttgagattcctgggtatgagattggggtcactgtggttaagtcccatccccttgaagggtttcagtttcttcgctgtgaagagcacttatctctggttcctttcaccactaacattctgatgtattttctaatttagccacctattctagaggagcagtattgaagggcttggggaaaccgagtgctctctaagtgtggccctcaccatccttcctggtgcgctatctccagccgtgcatccgaaaacatcccagtctgcccctggcctctgcatggagcctgacccccaacacagacctctcaagaggttctggattcactggtgctgctacagccctgagcaaaaacacagctgtttcgtttaccaccccaccccaacataagctgtcctcagactttacaaagacttagggattgcacagtccacaagactttcaatgcctttgccctgtatctcaactaactttcaaatagagggaccttcttataggaagaagaaggaaaaatcaagtggaaaaacaccttgatcaggtaattgaaggagaactggggctcaggctgccacttggtttggaaagggtgtggaggtggctaatctggccctggcctaagagcaattccaggctggcgggctggaccgcctgtctccatagcaactgttgttattggtaactgaataaccatttcctagaacagcggctggagctgctgatggttttcccttctacttggaagcgagaggagccaggctctttgctgattgatcctaagtgctgagctctttgctgattgggatcttcacttgatattgggcaagctgaagccacccttctgttttatctctgacctctgccagcagagagggtgggacaaactgacttaatgtctattttccggcttcctctgagaggttgagaaaggtgctcaagggcatttagctagcaagatctagaacttgaactttgccctgtctgattctgaaacccatgctcgtgaccacatggctgttctgactctgtcccattcctctgagatctcatgaaaacctgattagccctttctcatgacaccatgagctgtctaattatttgtgaggacaggtagcatcttacagtgatccatggtctgcacaaaggctgttctagaagctgtcttacttgattatcctgcagtggtgtcagtgggaccttaaaatgctgtagccctagagttattagggtcatgctcactgaggccattgcctcaaacttcctgctctccccctgcactctccctccatcctggggagtgataggtggtggagcagacctggctacaggagtgaattccagatcactttcatggaggcacttaggctattgtgtttgttaccaagccaaaggagcttgctgcccaatgcactagaagccaatactatgacactgggtttttgagaaacaaaaagctttttaagtcgactaacaaggagacaggagtccggctcaaatctgtctccctgtgctggctttcagtcatttcattaaaaaaggttgagggggtagattctgggattagcggatgattggtggaaggaaaggggaggtctggaaagtcctcgggcacgcgcagttctctctctatgctaccacatgtgcaaatttgcggggagtgttcatgtggaacaggcagtgtttcctgtttccagaccaggcaaggtggctcacaaatggctctacgatccagagaaagtcagcagggagggttgtgatttgttattatgaaaaattaacaaattacatccaaaatgtgtttaactcctattccctttgaaaaggatctttgggtacctaattgacatattttaagagacatattggctagttagacatcaattgacatcctcattaaatatcaattaacacatatcctaacgtaatatttaattagcttgctgtagctattcttttaaaagtcaattaaatgcttggcatattcttacaagccgactccattgatagcaattatggatgaattcctgtcataagtcatttttagtggatagcagggcaaactgattctgaatatacacatcaggtctttcaagaagaatttaaaaatcaatcattagatatctaatgaaccctcttctctgctgattgtgaataaaaggcatgttcggctcttggactgtagtttagtgcattttcacatgattgttggaactctaggtcaaacagaacagacacctgcctccagggagagtcgtgcttcatttgaaaagaaaattgtggtaaaataaacataacataaaatgtagcatcttaaccttttaaaaatgtatagttcagtagagttaagtacatttgcattgtacaaccagtctccagaaccgttttaatcttgcagttctgaaactcttgtacccattaaataatgattccctttcctctctcccctgagcccgggcaaccaccattctaatttccatctctaggagtttgactacttgaggtgcctcatatggaattatacaatatcttgtgtgtgtgtgactggcttatttaacttagcataatgtcctcaaggttcatccattttgtagcatgcattagaatttccctccttttaaaggctgagtaatactgcattgtatgtctagaccacattttgtttatccattcatctgttaatggacacttgcattgcttctaccttttggctatttggaataatgctgctgtgaacacgggtatacaggtatctcttggagaccctgctttccattctttgggtacatacccagaagtaggattgctggatcatagagtgtattagtctgttcccatgctgctagtaaagacatacctgagactggataatttataaaggaaagaggtttaacggactcacagttccacatggctgagtaggcctcataatcatggcagaaggcaaggaggagcaagtcacgtcttacacagcgggtgtcagacaaacagagagaacttgtgcaggggaactcctctttatataaccatcagatctcttgagacttattcactatcatgagaacagcacaggaaagacccacccccatgattcagttacctccctctgggtccctcccgtaacacgtgggaattgtgggagctataattcaagatgagatttggatggggacatagccaaaccatatcatagagtaattctattttgagttttttttgtggacatttttaagttaatttattcaatgcactcattaagcacctgtgctagtggacattcttaaaaaaggtgagctcagtctggtgagctggccggcccaggagtaagcctaacctgttagggctactgctgcagtagtgataatgtgagcccagatggtgtgatcagtgcatttctaacagtgtggcatggatcaggcatagcagggaggagagtcaacacagctggcctgaggctgcatcctcagaaaggtctacttgcaaggttggcccttggctggtgtctgggtacttgggttttgggaggattctgccattcccgtagctgataatagtggctcactgtgcctaaactgtttgtaggcatgtgctgagcccctactttccttctgggagtctggaatttcagtacatgttaggcagagtgtgcttatatgacctgtcccagtagaagccgtgagtattgactctctaatgagctttcctggtaggcaacacctcacacatgtcaacacctgtccctgggagaatgaagtgcatactgtgtgactccactgggagaggactctgtgaagatcgcacctggttttctctggactttgtcccatgtgccttttcccttggctgattgtttcatatctttttgctgtcatgaatcacagccattactatgactctgcattgagtcctgtgagtcctccagagaatcatggaagtgttcctggggacccctgacataggtgataccctgcaggaggccttatagaagcagaggggacatccgaggtagctcttgaaggacagggaagagttttccaggtggacaagggaggggtagccgtctagccaaaggcacatcatgagctcaggcatagagcctggaggagagtggcctgactaggcagctgcagctgaaacagaggacagccaaagccaaaagggtacgggatggccgctcatgacaggccaggagctgaagagctgggactctgtccatcaggcaatgaggagccccagtggagtttggagcaggagtgagggatgagggttctgctgaaagccccagtgggggattccaggtgtagtgagaagagaaggaaagcagacagaatgagaaagcagttgatagagtagccaagggggtggagaagagggaggaaaagggaaggaggctggagaaggaggaaagacagtcatcaggtacccatgggagaacaagtcatccctgcctatggtccacaatagggcaaccaccactgcccaagtcctcagaggatttcctccacatcctgcaggagagaggctgccctggctctgttggccaaggcagctggggtgagccatgtgtctctctctgcctcagtttgtctctctgttaaatgggaatgcaacaacacctacttgatggttgttgtgaggaattcctggaataacagatgtgattcaacttttatcccctaatgtgatgtcctcaggtggaggtgaagatggaggtaatttctaagtctggggcctgaaagctgggttcagagacaggccacatgccacgtcaggtcagacagtgaggtagctttgcagaaggaagccaagtgtattagtccattttcacgctgctgataaagacatacctgagactgggaagaaaaagaggtttaatggacttacagttccacatggttggggaggcctcacaatcatggtggaaggcaaggaggagaaagtcacatcttacatggatggtggcaggcaaagagagagcttgtgtagggaaactcctgtttttaaaaccatcagatctcatgagactcattcactatcacgagaacagtgcaggaaaagcccacccccataattcaatcacctcccaccaggttcctcctatgacacctgggaattgtgggagttacaattccagatgagatttgggtggggacacagccaaaccatatcaccaagcttctggagacatccattcctgatgtgggaaagtgatgccacgtattctggctgaattagtgaattcagtccctcctaggacactgtatcttggctacagagaggcatcttcaccctggaggtggggaccacatggtggcatgggacggggaggaatagcacactgcacagggtgctgggggcctgctctggtgcctgctccctctgtgtcctgggtggcgtgtgatgtggctaacgtgactgctctgtgtctggattctgcattgtgcctgtgcctggccttggaaccactttcaccctgaaaagtaactccaggactgttgcttctgcccattgccactcccctgcctacaagataaaggccatgcttcttagcttggcattcaaggcccccataatgacctccaaccctttttcctgatgtctgccctggctccgccccctggcacctcctcattatattctctgactgcactttttaccccattcctgacattacacccacctagtctagtctaccaccaaggcaatgacccccacgcctcagtagctaaagcttttccaaactgtgatcttgggcaagttccctctggtgcctcagtttcctcatatgtaggaaggacatgacacgagaggctgccctgttggcagctgggactacttcattgtttgtcttggggattaggcaagatggggttgaaccagtgactacctgaggcttctgtctactctgccccaagaccacctgctcccaagcccctctctggcaccatctgtcctcatttctgcccccaagcttctggcctttattctcagagatggccctgggtgttgcacaagcaaggtttggcctcaaacagacctggtttaaaactcacaggttgggtgcccctagacaagtcactcctctcctctgatccttaggtgggtaacagggggagctcatggagactgatgagttaacacttgcaaaatgcccaatgtccaggtgctctgtgaatgtcagtttcctccctccttccatgcccagtgcgggtctggcttcaattctgacgttaagtcagcccagcagcatgactgggaagagtggattctgcagtctgccgggagtcagctttgccattcactggctgtgtgaacttgggtgggccacttaaactctccaaactctgagtttctcatgtgtaagatgggggcaatcaagtgtccacccctaagcgttgttgtgaggagctggcaagagatcacagccccgtgcctgacacataagaaactcttaggtaaagctttgctgctactagtgatcttttctttcccaactctagtggattgtactttccaaaggaggctgcaacaatagctcccatcccatatgctcttcttacaaggtgaccttgatacaccccatcaggaggtgaagtctatgtccccaacccttgaagttgaacagacctttgcaactgctttgaccaacagagtatggcacaatgacgcgatgtgtcttccaaagggaggtcatgataggcaatatagccttgcctggctctccctctctaggcacacttgctctaggagcccagccaccatgctgtgaggaagcccaggtgaccaggagaggccatgtgtaggcgttttggatgacaaccagcctcagttatcagaaatgcatgagtgaacctttaaatgattccaagccccagctcctgtctgagcacaactgcaggagagagcggagaaccgcccagctgaacccaatcagtccccaaactgtgagagatagtgataatgatactaataaaaaaattctgtgggctgagcacagcggctcatccctgtagtcccagctatttgggaggctgaggtgggaggattgtctgagcccagaagtttgagaccagcctggccaacgtagtggaaccccatctctccaaaaaattaaaaaaattagctgggtgtgggggcacatgcctgtagtctcagctacttggaaggctgaggtgggaggattgcttgagcttgggaagttgaggctgcagtaaactatgatcgcatcattgcactccagcctgggtgacagcaagaccccatctcaaaaaaaaaaaaaaatcatttggtgaatatttttaagggaaaacagcaaagttttttcctattagtcggtgacctcagcatggcatcaatagaaaaacaagttgggaggaggggttgctggtggctattgataactgtcatggagggcttaggatgacagcagagttgtccctggggatcgtcgtgaacctcagcttcgaagctaagcacagacaacacagaggcggcagcagccggtggggatgtgtgtgggcctgcaagtcagacctgggtggatcctgcttccagcacccaccaactgtgtggctttgggcaagtcccttccctattctggacctcactggagacatgtttaatacacaggggctgggcttgaatgttcgtaaagatgctttggccacacacagggctgtgattctcagagagaaaaccccccttccgcgccctctcccactgccaggtggagatggttaggaggtcgggagcctctgcaggacacagggcaatccccatagagacaccagcttgctcagtccgtccgccatcttcatggtcttctctgccggccctctttaccttgcatttcccagcatcacctcaccgactcctctcattgccacatttctgtcctgtcacctcccctcacattttgctgtcacccacacccttgtagccatcctgacaggttcccactgtctccccaatgcattcatagactctcctacaactgccatcaaatcccaccctcttgcttcacaatccctcacaatccaaatgtcaattccttttacaatttcaggtcacatgccaacatccatcctcttcacccctgcaacccccagatgctctacaacctcaaggcaccacctccactctctactaccacccctgaagctgcccagcctttgcctatacttttgtggtcacctggaccatggtaaacgcttcccctgtcttctcattgtccccctcaccccacccaaaaccagcctgaaaattactgagttcccatttgctgcctggatctctgctccgtttcctcgtttgataatgaagagttgttagtataatctctgctttgcacgtggaggacttgaggttcagggaggctaactaatctgcttggagtttcacggggccgatgcctgaatagccgacacctggctaatgtcatgcctgcccctgctgcctcctgcttctcttacccgcattgtctgactttcatcctattctctctccctcctcctgcacaccccctccccacacctcctcccttccaagtgccctgtgtcgaactgaggcagaatgatctgagtacaaaggatggaaagatccagcaagcatggaatcctttggctcttggagcctcagatttcttaactataaaatgggagcaagagatggttccttcacgtgactgctatgagcataagcaagagcatacctgtggcgtcatgtaacagagttgggtgcacagaaagcatttaatgaatgaacaaaaatattccaggcacaggatgccatcaggtcatgaaaaacatcttttccagatccccccacgaggcccacctttgtccccctgcctgtgctctgggctggtgggatggtggcacagtcagctccagtaagccctgtgggccagaggcttttactctgcacctttactcagccccttagggaagaagaccccagatgaggccccagggcacagttatcaagaggctgagcagagcttggagccggaaactagagttgaaatccagctctgccactcaatggccatcgaacttcatctctttgtgcctcagtttcatcatttgtaaaatggggatataggctgtgcccgtctcattgggctggttgtgagaatgcaatgagtaaatccaagcaccttggcacatggtgagtgctcagtagatgttagctactgttctcaccacggaacccgctgagccccaggagccagagatccctgcttggcaccaacaagggacctgaggttgtgagctgtgcacagaaggccaggcccaggtccaggacggtctttctccagcccccttatgtgccaggctttgtcatcggctctctccacacccagcttttaggaatataattatgagacccacttccaggtgaagaaactgaagctcagagatgctgagaaactccccagctggtaagaggcagtcgggatcagagcccggattggctgttacttcaattgctcatctccagccattcacctggcactgaggacctgctatgtgccaggcactgttccaggtcctaggggtactctgcagagaaacatggatatgatgcctgccattcctggatttctacaagggcacgctgcctcaggagcaggggaaattcaggcctcaaatcttctgggcaagcattgttcatagggtcagctgagctatgcatggacaggtataagtggagcttgaagagttaaaaaataaacaagagccaaatatttctctgggtactgatgactgcttgatcaatgaagaaggaagaaaagattggggtgactggggctgcattaatagaggtttaataatcagaataaaggaggtgagagtcccacttgttgcaatctggatcagatctcatcagttctacactcgcatgataaggagaacatggggtcattgaacagatgatatcaaaagcagctaggatggcctgtgggccttggctgaagagctggggaggtgcatcaggcaaagaggcagcttacttggggcatcagtgttgttttcagctgcccaagggtgtcttatggactcacttcaaggaacttggagggccttaaggtcataacctggaccagatagtgaacattacagagttcttatgagaatgaactttgacctatcaaaatcctcagtaatgggaggcagttactagaagcagtgagttccttgtcacgtaaagagtgtgagcagaagctagaagatcatttaactagggcacttgggaggcgtgtcggactaggaagcatctcaggtttccatgcagctcatgcctagagtctctgcttttactgttccttctgtgtggaaggcgttccaggtagtgccttctcatcctttaggtctcagctttaatatcacctcctcaaggaagtctcctttgatcacgcaaggtaggtttcttcctctcccaccccactattctctatttcagagacctattgaattccttcacaggattttccacaatttgtaattatttagtttgttttacttgtttgatgtcgaatgccctcaaaagactgcagatgcaggaaggtagagaccaaattatctctgtttgttttgttgtcttgtttaccagctgtgcctccaatacctgggatatagcaggtcctcagtaagcatttcttggatggatggatggatggatggagagatgaactgatagacagatagatgaatgatggatggatgaatggatggatgagtggatggataagtagacgggtgaatgaatgaataaatgaatttatgtgtgggtggatggatgacttccagctcacatattttcaggtgtaaattctctgtgtgttcaggacatccttatatgtagattatcagcagagagctgagctatgtgcgtgtttcatttccagttcctgtggacaggaattatgacgtctctggggaatcactgtagtgaactgattagcagctaattacaggaggacattttatgttttgaccccagaattaaccacatgaactttgatgaagaggaaaatcaaggactgggtgaattcatttaaatttagtttaatatgtcctttcagcacataagcagctaataaaaatggacatctttcatgtgcaaatctcctcggaagggtcctccgtggatgttccagggtcacagccaattctctttgaagtgtggcccaaagatctctagaggcaggttcgtgagctttgttaaaatgtagattctggggcccaccccagacccactgaatgggaacttcggaagtggggcccaggatgggacatttctgaagcactcttgtccgagcttaggctcctgggaaaccatctcagacagaccctaacagataatgaaacaggccagccacgcacagtggctcatgcctgcaatcccagcactttggaaggcctaggcgggcagatcacttgaggtcaggagttcgagaccagcttggccaacatggtgaagtctcatctctactaaaagtacaaaaaaattagctggacgtggtggcacgtgctcataatcccagctacttgggaggctgaggcacaagcatcacttgaactagggaggtggaggttgtagtgagctgagatcgtgccactgcactccagcctgggtgatggaatgagactctgtctcacaaaaagaaagaaaattattatattaaaaaaaaaaaaagagaagcagcagctgaggccagagagggacagtgacctacttaaggtcacccagcaaatccatggcacagctcagactagaaccttctcttttgtctgccagaccaacagcctgttcttgatgatgggtgagagtgaatggaatttagggttaaaagtaatcatattgctcccatcttaaacttacattttccagtcccaattttctatgagtaatgtccattaaataattaatgttcctgaaaatagtctgggcttcctcatgcctttttattcctggaacatcaaaccttttcagatcataattaattaagactcttgatgtccccgagaggtagccagacacccgcagaaacttggtaattggttccgaataccaagagacacagtctgcattctagaatttccctgatttgagaaggggatgggactggagagagactaacgtggccccgagggctgccacgcaccaggcaatgtgcaagttgcttctcatatgttctcacgtctcagtcttgtgacactgggaggtacgtggaattatccccattttacaaatagaggcaatggaggctcagaccacccaaggtggcattcttcagcctggtggcattgaaggaggtggcaaatctgtgttacagaactcatcacattctcacaaattgaggtcagcgtggtgattgttctacgctgttttttgttttgttttgttttgttctgttctgtttagagatagcgtcttgctctgtaacccaggctggagttcagtgtggtccaaccatggctcactgcagtcttgaccatctgggctctagcgatcctctcacttcagcctcccaagtagctgggactacaggtgcatgccaccacacctgcctaatttttttatttttatttttttgtagagacagagtcttgctgtgttgcccagggtagtctcaaacccttgaccttaagcaatcctcctgcctcagcatcccaaagtgctgggattacaggcatgagccactgcacctggcctatgctggtttcaaaacacgctttgctcatggcttgaccacacttggtcagcgtggctgagaggagtggagtgagtgttcctgggacgcactaggagggtaatgaggaagggtcagcagagctggggcctggggttagacagaggccacgctgcaaagaacctgcctccaggcaaatagcttgttttgtgctatttctaaataaccactcctcacacccatcaaagccttcatgggggtaccacacacaaccacccctagctgttcattcattcattcgttcgttcaacaaatatttactgagcacctgctatgtgccaggcactgtctcaggcactggggaaacagcagggacctcggtggtgacacagacaataaagcagcagcaagttcattactgtgaacccttgaacaatgcgggggttggggtgccgaccccttaccccgtgcagtggaaaattcttgcataactttaaaacttaactaaccgcttcactgttggccaaagccttactgattacataaacacttgattcacagatattttatatgttttatgcattatatactgtgttcttataataaagctgcagaaaagagaatgttattacgaaaatcataaggaagagaaagtctatttattattcattaagtggaagtggatcatcacaaaggtcttcatcctcgttgtcttcatgtttaggctggggaggaagaggaggggttggttttgctctctcaggggtggcagaggcgaaagaggtggaggaggtggaaggggaggtaagagaggcagacacacttggtgtaattttatcacaaaaaatctgcgtataagtggtcccgcacagttgaaacatgtgttgtcgaagggttgactgtcattcattaattacccattgtcatccatgcaatgaaggtccagggtgttggggggcactgtagagagggcagttagggaaggcctctgtgcggggctgacgttttaggttgagaactgaaggctggggaggaagcagatgtggaagatggggaacagtgtgctgaggctcagagtgggggaaaagtgccataggattgtggactgtggactgtggaccagaaagaggactcccattcctgccactcctgccccaagaagggggagcaggtatgtggggagggcggggcgaggtggtcctggccagctgagaagtagtgttggaacatgagggtgctttagccccgggttaggaaatggggggccatggaggggtgggggcgaggagtgacacgggctgacttaggatgtgtaagcgccttgtggctccagtgtggactgcaagtgggggcaggtaggggctgtgggtggctgcagggagcccaggtaagaggtgctggctgcttggtctgaggagggagggatgaggcctgagccaagggcagacccagatatatctagcgcagggagtgcacctcacacaggctgacttctgggtatttggagactccctctgggccagggcagggacttttctcccattcaataggtgggaacactgaggcctccaaagtgaagtgatgtgcctgagttctctccggcaggtgcagcgctacacaaggcctctgcccacctttgtggcctggctggaccagggatcttgtccctcaagaagtaagcgagtccagctcaggagagaacccagccctgcaggtgctcagggcagacacagcctcgatttacagtgaacccctcccctggactggacaaggagggctcagagaggcttgagatggagcggggcttgggaggaggctgcagtcaggtgggggaagaagatgagaggcccgagcacagttacataatgacaatcagcagcagctgaggacaggcagctttgatggtggtggtggtggtgaggtggggcggggtggggtcgggggtagcaagagtgatcagagaggccttcctggaggaggtgaggaaaccacagaccaaagacgtggccagcagggtgtgagagatgccagtgagagtggagggtgggtttgcgtgggagagaccatctaggtgagaggatggggtgtgggtgttttaggattaggggtgaagcctcatcatctaggctgggaggcaggaggcctggcctgtggccccagttcttccctgagtgatcagctgcctagagtggccagtcacatcccctctggagagccctttcccctaactgagcctcgagggggtcctggttgtggcaaaacaagcattccccattcatggtaaaaataatctctccaaccctcttagaagatctgtaatttctttcatttctttcatatggtatatgttaaaaagtagttaattatttggatagcatactgttaaagactgtattacaaagttcatgtttaatgcagaaaaagacatttttataatcttgtctcttgaaaaagagatacacacaatttcttgtgaattaatttcttttgaattaattatgtaataaacggtacaatttgttgacaaatatatctttgaaggacatctcatgattaattttggggaataaatgcatatgaaagtgtagattgatgtttcattctgtacgtaattgaaaaactgctttcatagccggatgagagggatttgtgtgttttgtgcctaaaataaaagccatgggattattggtgaatttggaggttttgtttcaaattgactataaataggagagaaggctccaagctgatgttggtaagacccactcaggaaacccattgtggcgtgaatagcttttttcccctccaataaatgaaaagttaaattggttgtgcccatctctgtattttctctctttgtaattggtttttgtggtgctggaaacatatggatgtgttttataagaattctgatcagatggcaccaatgaaaggtagcacgaggcacatccagtgaattatcatttcagcggtgcccattcacttgtatttcaacttcactgtccctggcttcctgttcttagctaatattctgttgtgggtataaatgaaacaggtatgagtaagaatgtgagcaactggaactgtcaaacagtcaacatcctacaaacaaatgtaaaattacaacagtgataagattcataagatgcttataacactggaatatagtcggtggccaacaaaggttagccacggtgatgatgatgaggggtgctcagagagggagtgctctggagctgaactgctgtgtgaccatgggcaagctgcttaccctttctgtgcttcagtttcttcatttgcaacatggagacaattaaggtatatgcctcataggttcgttgtaaggtttaaatgaatgaacgtaaaaagtgcttagagtgttctgagcaaatggtaagagctaaaaaatgttacctatttttaaaaatcattatcactgttattctcataattagtcaaggaaggcttcccagaagaaatgacttggagctgagctgtagcagtagcaaggcaacaatggaggcataagcattccaggcagaaggaacagcatgtacgaaagtcgtatggtgggaacagaccgtggtacatttggggagccgaacagggctagtggggctggagcagagtgatcaaggaggagtgggaggagacctgaggctggagagatcagctgggggcctgaggaggtagggcctgggggcttttttttagggctgttagtctttatgctggaagcaataaatgccaacaaggggtttgtaagcagtggggaggcaaggtctccctgttgatttgcaaagctccctctagtggttttggggagggctgaggatggtggatgagggcttttggtggggtggggctgggagggatggagagatgattgcagagaggagtctaagatgcgcgcccgcaggagttggtgatgcatgtggtggttgtgaagggtgaggaagagaaaggggacaaggacaacgcccctctcttttggtttgtgtagccactgggtgggtagtggtgcctgagaatgatggtgtggggggtgagattacttctctgagcctcagcttccttatttgtgctcccagcctgtggtggggattattaagtgagagaatgcatgaaagagcggtcagcgcagcccccacaacgtgtctttttcccccagactcatcacctgggatctgcttccttcctaccacggcattggtggaatggaaggtaaatatcactcacgcccaagtccctggatcttgtttcctcatctatacgatagggacaagggcccttaacctacaggtttctatgagatttacaggatgacactttatgtgaatgaagggccgtgggcaagcctgggtccgagagacgtttcctcttcctacctcctcccttctgcagcatgccctaacagaaactttttttttttttttttttttgagatggagtcccaccctgtggcccaggctggagtgcagtgatgcaatcttggctcactccaacctctgcttcccatgttcaagggattctcctgcctcagcctcccgagtagctgggactacatgtgtgtgccaccacttccagctatttttttgtttgtttgtttgtttgtaaagacagggtatcaccacgctggccaggctggtcttgtactcgtgacctcgagtgatctgcctgcctcggcctcccaaagtgctgggattacaggcgtgagccaccgtgcctggccctgacataggtacatttacgtgcatgaaacatacgtgtacatacttgtgctcacacattcctcctgccaatttcttccctcaacacacgcatacatgcacacacttacacacacatttatggtacccacctccacacatcccttgaaaaattcaaactcagaaggtctctagagccccacttgctatcaatgaaaatacaatgcaaaccatatatatcattttaaggtatcttgtagacacattaaaagtacaaagtaaaagtacacattaaaagtacaaagaaacactgaaattaattttaatacgacatttcatttaacccaatatgtctaaaatatcatttcaacatgtaatcaaaacaaaatttgtttgaaacttattcaaacttattttgatattcttggtgggattttttgtgcggtcttaaaaatccatgtgtattttacacttacaagacgagtcacatttcaagggcacaatcaccacatgtagcttgtgctatgacactggatagcacaattagggattatctactcagaaccctcattcaacagatggggaaactgaggccctgagtggggcagtgactggccctgaagaatgcagcctggccgctttatcccacaacaccctgctgtgtaaggtatccaaggcccccatctacccctgctgtctgcagagtggccccggcaaagctccatacctggccttccagaagaggtgctgcccatgcattaatcaggctgggggtggcctgcaaagcctactcgtctatcattctctcctgggggtgcatcatttggaagcatcagggttccctgcagggagggaacacttgagtcctcccccttttcttacagcccccacatggggtggctggaatgcaaccacgtggaagccaggcaaggctgggacaaggggaacatggtgactctatctccctggtgggcctggtcctggggtcaggaaattcattctgcctgccttggttctgccattagctactgaggccagagttcacggacagtgggcagctgacccagatcccatatctcttcccagctgtgaaagcttctctgccaatcagccaccagagtcttcaaggctaaataagaggtaatgagtccgctagaaaaatgggtcagaggccaattaactcaggctcagatgtggctgagagcctgctttaactatggcaatgcctacagcacgaggcagagctgggggattggacctttcgagagaggggttgaagatggagcctcaaatgtctgaggggcccagggcttgcgggtgaatcagagtcccaggccagcttcctggggacttgctacctgccctgccacctggcccttggaaagcagacaagggcatatgccacatactcaatgctttgagtatcatctcatttaaccctttcaacaacacggtgtgagatgctgtacagtggctgtccccattttatagatgaggaaactgaagtgcagcaggggagggaacctgcccagagtctcacagtcagtaatgggaggagctgggattcacacccaggtgagcttgactctggggtagggctagaaggtgcactttctgttatagtttcacccagggtcaaagccaggctcatttaggccaggctctttcgtgcagccagatgtctctctgagctcttgttccagagagccagctgcactgggaggtatctctgtaggtcctgggtgcctcataccctccacactcaaacctgagctcccctgacctgcccctgccctgtccgcctcatggagacaggagactgtccacatggaattagactcccaaagccattctgatctcctgctgctccctcaacctcatacgcagtgatccatgcaacaaacatacactgagcatctgtgatgtgccaggcactgatctacgttcaaaggaggaaccagtggacaaaatcaacaaacattcctacgttccatctctcaggggctgactcaagaggaaacatgaataagcaaatgatgtgccccggggactgccttggaggatgtggagcagggtgaggaactgggaatcttggaggaggttgcaatatttattggggtagtcggagtgtgccttattgagaagctgacccttgagcaagattttaaaggatcaagagaatgagtcatgggggtattgaagggaagagcattccaaagaaggggaacagccagtgcaaaggtcctgaggaagaaatggcgcttgcaagctcaaggaatagcagagtgtgggtgaagaggaaggagtaggaagaggagagagatcttagcaggagatgaggtcagagagaagacagggagcgggcagatcatgcggggccttgtagaacaatgcaaggcctggctttgaccctgggtgaaatgatgccatctgatttaccttcaaaaaggctcacttggagaggggaggcagggaggccagtgaggtggctgcagccaaattcaggtaagagaggagagggtggctgggaccggggagaaggggtcagatttgagtgtgttgtgaagaccgagctgccaaggcctcctgatgggttggacaggttgacaattgagaagggggagtctgcaggtggggcaggtttggggaaagatcaggagtcccgctttggagctgtgatgtggaaagccctcctagacatcccagtggagctgttgagagagtcaggtttatgggcttccagatggggacagaggtctaggctagagtggctggcatgtgggtagatatggtcaccaagggctggcccccagggccttggggagaagaggagggatgaacagaggcaatgagaaggagtagttgcagggttggaggagaactaggagagctgagctgtgccgggtcaggtaagatgaggactgagcatcgcccaggagacttagcgatgtggaggtcatcaggggccatgtgggtgaggcctggcaggagatcctgtgtctgagcaatctataccttttatccatgtggcaggctgaatagcagcccccatgaggtgccaggcactaatccctgcagcccctaaatattgatattagcttatgtggcaaaatggtctttgtggctgtgataaggattttgagataggaaaattatctgctaatttatgggccctacatacaatccttataagagagaggcagagggagatttgacacagacagacagatggcaatgtgacaccgaggtagaaattggagtcatgctgctataagttaaaaagtggcacagccaccagaagctggaggaggcaaggaatggattctggcctggagcctccagagggagcacagtgcccttgactctttaatttcagcctagtgataatgacttcagacttctggcctccagagctgcgagagaataaatttctgtggctttaagccatcatgtttatggtaatgtgtcatagcagctacaggaaacaaacacgccccttctggcatcaggtcccctacttcccaccctccttagtcatcctctgtccctcatccaacaattgtcacagcctcatcaccaggctcctgctccaggctgccccagcacctgccctccccacacagaacctgatggggtaacttcgattcctaataccctctgcatggagcccacattcattagcctgaagcccagtgcttttcctgataaagccctaacagtctccacactcatttctcaccactggctcccaccacttatgctccataacctccatgcaattttcctttgctacatgttctcttaagcttctgagccattgtacttgctgttccctctgcctggaacacccttccctatcccagaaataggcatggtttgtttcctcatcgaatttaggtctttacccaaagagcttttctgatgaccattttaaaagtgcaactcccttttcagccccacattcctgattctcttcccctaccttgtttttctccgtggtgcttatcactcactatatatgtatttaactaatttgtttgttgtcttgtgcctccaattagaattaaattccacaggggcagggaatgtagtctgttttgtttacacttgtatctccaccaccaaggaatatgtctgacatgtaataagaactcaatagatatacgccgaatgaatgagtgggtgtatgaatgaatgagcaaaagagacaaaaaacaaaacaaaacaaaacaaaacaaaaaactaaccaggtgtggtggcacatgcctgtggtcccagctactcaggaagctgaggtgggaggattgcttgagcccaggaggcggaggttgcagtgagttgagatcatgccactgcactccagcctgggtgacagagtgagactctgtctcaaaaaaaaaaaaaaaaaaaaaagagactcagaaggagaggtcagtgatataggagaaaagaaagccaggagcacatgatatctctgaggccaagagagttaagtgtttcttaaaaatatagaaacttctgaatcatccattgtaaaaatgagtcaagtctaggtataatgctaatgtatttttattgcataaaactttttcggggatttgattattggcatggcctacctgtgagccacaatatttattcaacaaaagacccattcagctagttccgccaaactcttacattctctgtagatgaggacgccttaagtgctgagccctgcgctatgcttcatgctgtgattttcccaccaaccctttccatggggtctaggggcaggtaaacagagtggcccctcaccgtttcctgatcccatttccaggaagtaactagcaggaaaagcttgatgtgtagcatggtgtgtctatataaggagacacaaagctatgtcattttgaaagtggtagtccacgaatcctattatctcgcaactgttctccctccccagtcccagtcatctgtggacatctttccatgtcattattgaaagatctgtgtcatttctcccatcactttagggccacctcatcccaccccagagtaactatggagaccagtttactgtgcgcctttcctggtgtgtctgatcttagtctcaccatgatctgtctatataaacatacacatatatacacacaaacaacgctgtggggagggacgcacgccctgtcacagagcagcagctgctttctgcagaccagctctctcacctgggagtcccccacaacccattcccagcctctaagaagcccacgagcaggtgtgggctctccagggaggtcgtggtggggaaagcagccctttctgtgagagatgagagcggggagctggggatgggcgtgttaatagtcctctcttgcaacctacacatgctactttagttttagcaggtcatggcatcacacttgagtatcggcctgcgtcttgcttccttcactcaccagcttatcttagagcactctccatgtggaaatgtacaggtccaccccattgtgagtgagggcttcatagaattcaacaggatggccaggtcacactgtatccagcttccctcccagggatggatccccatgcagttccgatcttctccttgcacgtttggaggctggggctattatcaatatctttacacactaaacatttactttgtgtaggtagattcctacacaagtagtaggattgctagatcaaagggcaaggacatttaagattgtaattgatgctgctgccgagttattttttgctattatggtagcaagtcacactcgtcctccgtgcgggtgaatggatccagatgcacgtggttgtcagtccaggcagggaagtggatgagtagggaggcacaagggagcttaagaggaatgggggcgtgttctgcctttttttttttttttgaggcagagtctcgctctgttgcccaggctggagtgcagtggcacaatctcggctcactgcaagctccgcctcccaggttcacgccattctcctgcctcagcctcctgtgtagctgggactgcaggcgcccaccaccaagcctggctaattttttgcattttttttttagtagagacagggtttcaccgtgttagccaggatggtctcgatctcctgaccttgtgatccacctgccttggcctcccacagtgctgggattacaggcatgagccaccgcgcccggcctgcctttttttttttttaagagacaggatctcactatgttgcccaggctggtctcaaactcctgggcttgagcgatctacccacctcagcctcccaaagtgctgggattagaggcatgaggcaccgtgcctggcgtgagttctgctttgcagaaaggatgctgggggtgagatgtatcaaagacagtgcagcggagtggatgtcactccctcccacccctatgtggacttctttcctattcttcttttcttgtgggccttcttatattcctgggcaagagggaacatccagggtcaggctagtgagcacctccttacattttgcactttgtcccagacctggcaaaatcatacccattttacagatgaagaaagtaaggctcagggcagtgcaacgagtgtccaagatcacaggacctttagctgtgtcccttctccgaggactcctgtggaatgtaagggaggcaggatggggtcctccagggagaacagcctggccaataagcagaaggggcctggagtcggggtgattctgggggtgccactaacttagcttggcaatcctggctccccacctctcaggccacagctatggcacctggaaaatgggtgggtggacttagattaagggttacaaaaagaaatggctacagaggacccaggagacaagtagatctggccggtacacggttctgagactttgtggatgccaggcctggggtactgtgcaatgatggggcatgctagggcctgggcactagagatgatgtcctggctgaaggagcagcctctactcatgctgggagcagggtcccaggaggggaggctggtgcagtattgccagcattttttcttttcttttctgttttttaagacagagtcttgctctgttgcccaggctggagggcaatggtgcaatctcagctcactgcaacctccatgtcccaggttcaagcaattctcctgtctcagcctcctgagtagctgggattacaggcacacaccacaatgcccggctaatttttttgtatttttaataaagatgtggtttcaccatgttggccaggctggtcttgaactcctgacctcaagtgatccactcacctcggcctcccaaagtgctgggattacaggcatgagccaccatgcccagctccagcatttctttggagaaagtgaaaacttgggttttctttctctttttttttgagatggagtctcactctgtctcccaggttggagtgcaatggtatgatctcggcttactgcaacctcctcctcccgggttcaagcgatgctcctgcctcagcctcctgagtagctgggattacaggtgtgcgccaccatgcctggctaatttttgtatttttagtacagacagcgtttcaccatgttggccaggctggtctcgagctcctgacctcaggtgactcgcctgcctcagcctcccaaagtgctgggattacaggtgtgagccactgtgcctggccaaaacttgggtttttccagcagtatggagttgtgaaaggctggccattcgcggggtttgggagccatcccttaggcctcctgggactctcaaccctttgcaatcctcatgatcaaacactcctgacctttctgagccatgggcctcttctctgagcacatcttttaaatgcacaaaataaaaatatattagattacaaaggattccaattatgttgaaacatggttatcaaaatattaaaaacacttttgatatagtaataaatgtacttcttcattaatgcactaaataacaagcgctagggacaggtctaattagcatcttaactttgaagtggtactgggtgtaaacgatctatggagatagtagcaatgactgtaatgcgatatgaaaatatctatatttcttttggtgacaaagccaagaacaccactaatacaactgtggtttgttgttgacattcgcaagggaaggaaatgctaactttcagggcagtggtgctgaagagacagatgtaatattttttccacctcccaagattaccaactccctccgtgaggatcccctgtcattcatggggttaggggtgaacaggacggggctcggaccccagggtgaagtgctcatgaccagaggcccttccatggctaaaactaggggcgcaacaggagctgatccccagggcaggcctcccgcagcaggcaaacctgagatctgggaagggcctgcccttcctccctgcggccctggtgagtcacaaaacgtcctttctcaggaagaccaaatataaacagttcaggattatcttgagaacaagatgtttgtttactttctaaaattgcagacatggcaaagtgctgaggcctacaactgcaattaataataatttaggcccatcgctcccagggcagagctgcatctccgtgttagagacaaagacccatcttttccttgttttgtgttcaggcaacatgacgttatttctccctagtcatagatatttttattgcttgtatcaccccagattatacaagcaatacatgctcattgtaaaaatttcaaaatactacagaaagtaaaattttccccattttaactcattcccagagagaaccgctaataatgtattcgatccactgtgcttttcgtctccatgcctgtactcacacacattaccgttcatataatttctttttccaaatggcattctgtgaaaattgttctacaacttgcactttttttttttttttttttttttttttttttgagatggagtcttgctctgtcacccaggctcgagtgctcggctcactgcagcctctacctcctgggttcaagcgattctcctgcctcagcctcccaagtagctgggactacaggcacctgccatcacacctggctaatatgtgtacttttggtagagacggggtgtcaccatgttggccaggctggtctcaaactcctgacctcaggcgatccacccgcctcggcctcccaaagtgctgggattacaggcgggagccactgcgcctggtctcaacttgtacttttcactgaagatatcataaatattatttgttgatatgtctgtctcctcaattagaaattggagtttcagaaaaggaaatacagtactttataaatctttttaaatcaatgcgccttacccaacaattcatacataataggattcaacaaatatttgctgagctagtgaccaaattaataaatacataaatttgtttttcaaaaaataaattgtgaacacctttgtatgttcattaaacaatacttcattgttgcagggctcctgagagctaagttgtagggacgtgactgaatttttcaatgaccactcacaggtacatgggttgtttccaatttttcaaacctgttctgccccaaacatccttaaaacatatatatctttgtatgcttctttatgcattttttagactcaaagaaaggcctatttagattgtaccaaattacaaacctatcaccacagaatcttttttatctgttccctcaccaacactgagtgtttatttatttagtggatgtgaatgcactttattcaacaaaaatgaggcctatttcaaatatgccaaaggtgcttctataattctttctagtaacatttctaattggatttttattcttttgaatatttcaaaagataatatactttgaacaatttcaagcttgtggaaaaattgctagaacaatacatagtactaccatatagccctcaccaagatcatcaaattcttaacattttatcacattctggcttgtgcgtgtgctctctctctctctgtctctctgtctctctctccttccattattctctttctgaatctttggagggcaagctgcacacatagtattccatcatctttaaacacagtcgtgtgtatttcaccagaccaagttcattctctacctaaccccaatgcaaccctccaaatcaagaaatcaacatcagtacaaacaccaccacccaatccatggaccccattcaagcgtcccaacaatttgtcttttcccctctggtccagaaccttctccaagaacatgtattgcatttagttcttgtgcattttcagtttcctacaagctggaacagtttctcattttgccctgtcttttgaatcctcaatggtttttttttttttttttttttttttgagacggagtctcgctctgttgcccaggccggactgcggactgcagtggcgcaatctcggctcactgcaagctccgcttcccgggttcacgccattctcctgcctcagcctcccgagtagctgggactacaggcgcccgccaccgcgcccggctaattttttgtatttttagtagagacggggtttcaccttgttagccaggatggtctcgatctcctgacctcatgatccacccgcctcggcctcccgaagtgctgggattacaggcgtgagccaccgcgcccggcctcctcaatggttttaaagggctccattctctagggtgatactcaactcagatccatctgaagtttccttgtgtccacactcagcccatgttcctgggcaaggaggccgcaggatgctgctgcattatttcagtgtatcatctcaggaggcacaagacggtgaccacctctggaggtgttaatctcgaccaccaggtcatcttggtgcctgccaggtttccccagcgtatttttattttattttattttatttatttttgagacggagtttagctcttgttgcccaggctggagtgcaatggcgcaatctcagcttactgcgatctccatctcccgggttcaagcgattctcctgcctcagcctcccaagtaggtgggattacaggcgcccgccaccaggcccagctagttttttgtatttttagtagatggtgtttcaccatgttggccaagctgatctcgaactcctgacctcaagtgttctgctcgcctcggcctcctagagtgctgggattacaggtgtgagctactgtgcccggccttaggtttccccaccataaactcaccatttcccttttgtaattgattggtatgttgtggggaagtttctgagatgatgccaatattttctgttccttgttaaacccccttcatggatgacttctggatcagtcacctttgtgatattggccaaatggtaatttttgtattctcatcattccttctatacctatgagttgatattctattgtaaaaaaagtcttttccttttcctttttgtatgtacgggtgtatttatatcagcaggagctcatggatttctattttataattcatttctatcattacctagtttgacgatcagaatcttgtctccagcctgggcaacggaataagaccctgtctcaaaaaataaaataaaaatccaggcacagtggcttatacctgtaattccagcactttgggaggccgaggcaggcagatcctttgagctcaggagttcgagaccagcctgggcaacaggacgaaatgctgtttctaaaaaaaaatgcaaaagtcagccgggcgtggtggtgtgcccctgtagtcctagctactttgggggccgacgtggggaggatcatttaagctcaggaggtggaggctgcagtgagccaagatcacaccactgcactccaacctgggtgacagagccagactctgttgaaaaaaccaagtcttttcccagatggcagggaccccttcaagaacacagtggctgccatgtccttttgctatgacttcatctttcattcaccatttccttactttctggcataatgagatattctaggttcatctcgtcatcatgcattttctgcctcagccttggcattagtcatttcttggagtagccctgattcatttcagtgaagggtgatatttacaaccaagatctgggcactcagtgtactcattacacctgggatgtaggtatatgtgtgtgtgcgtgcatgcacatgtgtgtacacacatactcctgcttattcaactaaaaattatttgcatgtgtgtctctctctctatatatatatgtacatacacacacacacgcacacacacacgaatcatgagtttataccaaaacctccaaatccaatccaatacctcaaggttatttctagccttctccttttacatttgtaaatatcttaggcaatgagaatcttggctctcattatccccaatatatgtactaatttattcaattgctttgcttatttgtttcatataacctatcttccaccatcgcaacatcctctcaccgtcctgcatctgcggctgctgtgactgtcagcccacacacctccacaaagccccccccgacaccaccgccccagccagcctcctcggccatgaggcccatgggcctcacactttggcatgaccccccacctccagccctgtgtccttgccactgactagtgccttcaccagcccacttcctgcattatttccaatcactcaatttggccaatcttacagtttcaacaaaaatatcaatgttgtcattttaactttttttctttttctgagacagagtctcactctgtcacccaggctagagtgcaggggcgcagtctcagctcactgcaacctccgcctcccgggttcaagcgatcctcatgccttagcctcctaagtagctgcgattacagccatgtgccaccacacctggctaatttttgtatttttggtagagatagggtttcatcacgttggctgggctggcatcagactcctgacctcaggtgatctgcttgcctcggcctcctgaagtgctgggattacagatgtgagccaccatgcccggcctcatttgaactccttaatcatcaacaaggttgagtatcttttcttgttgtttcttatttgaatggcttgttcatttattttgcccatttttctactatgttgagctattctcttcttgatatgagagttctttgtactgtagagatgttggatcttggttccttgcaaccaattatcttttgattttgcttatggtatatgttaccatttaacatttttatgtaataaaataagacttcttatttagggttttatattccccaagttttatatagatatatttttcctaccattttaaacattcagaaaatatatacctcgctcatctctctggaatatattttggtatttgaaggaagtttggaatttttttttcctcccaaatgtgtagccatttatctcaacatctttttttttttcggatgaagtctcactttgtcacccaagctggagtgtagtggcggaatctcgcctcactgcaacctccacctccagggttcaagtgattctcctgcctcagcctcgtgagtagctgggattacaagcacccaccaccatgcccagctaatttttgtatttttagtaaagatggagttttaccacgttggccccactggtcttgaactcctgacctcaagtgattcacccacctcagcctcccaaaattttgggattacaggcgtgagccactgcgcccagcccctatatattttattgtataatccataaacttctgactaatttgaactctgcctttattacaaattaaactttggtatacacttgggtgtaatttggattatccattctgtttccctcatttgtctgtttctttaggcaacacaatatgttattgattactgtagttttataatactacagtaatttttaaatatctggtaaggaaaatccccctttaatgttctttttaaaggatttttacagcattatacatttatttttgggggcagaatttagaattattttttgttaaaatccgaaaaagtgtttttgatattttaatttggattgcattaaattttagactattttgaggagaatatatatttttatggtgttagatctacatacaaggtacctatcagtattcatgcagtcttttcttatatgttaagtttctaagccgtgctttacatttctctgcattacaggctctgcacgtttcctattatgttcatccctaagaattttctgggtttttttttttttttttttttgctattgggaaatgaatcttttattccatcatattttctaactagctgttacttatatatgtcagagtatagagggaggaagtagtctctggtggttaaacacatgggctttggaataggaccacctgggttttcatcctggctctgatattcaaagctgtgtgaatgcagcctggtgacgtcacctctctgagcctatgtcctcatttttaccataaggataaaaataatacctatttcatggaaatgttcatgttacatagtaagtccttaacaaatattagctattatttaaaatttttgtaataagccattttagtgagctattctattgtatatatattttctaacttattatattgttattcctgtattatcatattatattgaattattattttatttctaatggtttatcagttgactctcttagatttttgggaaggtgattatataatatataaatattttgctgccttctttccaaaagttatatcttattttattttttctgtagagatgaggtgtcgctatgttggccaggctgatcttgaactcctggcttcaagagatcatcctgcctcggcttcctaaagtgctgggattacaggtatgagccactatgcctggcccctcttatattattttcttatttacttgtggatgccctgattctgttttatcagaagaaatgctcctatggctgaagttttgagtaagatgttagttattggagacataaatatgtctccatacagtagttatctatagatagctaaatacccagatatttagcttacaaaagttacaaaattatttttaacttcattataaattgatatttcattttagctaataccttttgggagggcatgaaggagatgactttgtcatttttctattttaacccattgatatggtaaatcatatctatagatttcctaatattgaaccatccttgtagtcttggtgcaaacccctgcttggacatattatggtagttatatgatgtactgttgtaagtgattcattaatattttatttaatgtttgggatcaatttgcttttttcttgttgttttcagcttttagtgctacttttatgcctgctttatttaaaattcaaaaaaattcttctttctaaatgcattggaacactatttttattccttaattatatttttaaaattgtattttaccatacagtaaaattgactttatttggagagtgtacagttctatgagttttgacagatatatatatataatcagcacatatcaaggcataggacaattccatcattacataaagctctcttgtggttgctaaccagcagggaaggcagaggaggaagggagggaagaggagtaagaggaagaagaagaaagaaagatggagggagggagagaaagggaaaaagagaaagagaaagaaaggaagggaggaaagggggaaaaagggaggaagggaaggagggggaggaaaaaagggaaagagaggtgaagggaaggagagaaaagtgtgagagagggaggagggaggaagggaaggctgaagcagggaggaaggagaggagagagagggagagggaaagggagaaggggagagaagatgatgatgatcagaaggaacttgtggaacagaatcaaacattcctcaggggttcccagaattgtttttatggggaacctagcagaaggatggattatggttgggaaggctaagagtcatagtaatttggatcttaaaattactttctggtcaaagactgttgaaacctgagaacatattggtgaatgtttgtttggaagtaactgttgaagcctattaattttcttctgaatacagctttaactgtttcagtttatttgtcctttcagccaggagttgttggtggggagaaaatgtctgaatttttattttttggtttgcctttactattaatttatgcttctattgcatgaagttcagagcttgtgaactgtactatatctactatacaaatctaaaagatatgtactatatcttttagatttttttaggtttcctttgtagcctagcacatgtcaaatattccactggcatgtgaagaaaaggaatattctctgttttctgtggacagagtttaacatattatatatacacatatttgatcaatgtcattaattatattatttaaattatttatagctttaattatttctgagaggagggagttaaagttttctattcttgtgtttctcctgatttcacattgtatttatctaagagtttttgcttcatgtcttttgatgttacattatctggaatgatgtcattgacaatcattctcattgtgttttacatcctttatcagcatgggtaatgctttgtctcatttgataatttttttggtttcatttcaactttgttgatattagtgtcatgaatcctaatttcttttagttcatatttgcccggcaggttcccaaaaatcatttctttaaaattccttcccaatcctttccttttctctcactccctcctgcccccatcttaactatccagttactgatatagtttatcacatgtttttactttctaaaaagagatatatttatctctcttccttgatttcttagctcaagatacaaaacaatgtataatagtgtatagtgagtctctaccataaaaaattacaagatctgtggattcatacttcctccttatttcaactttgttatgatctgagatttttatcacaggccattgtaggtattccattttaattgtttatttttacataatatagattttctttgaggagttataattttgacttaaaattaaatttcacagtttttgaggcttgattttatatttaaaaggatccaagattcacttttttttccccccgagatagggtctcactctgtcgcccaggctggagtgcattcttgcagtcatggctcactgcagcctccacttctgtggcttaagtggtcctcccatctcagcctcctgagtagctgatggtacaggcatgcgccaccacacccagctaatttttaaattttttgtggaaactgagtttctctatattgcctaggctggtcttgaactcctgggctcaagtgatcctcccacctcagcctccccgagtgctgagattacagatatgaaccactgtgctgggcccaagattcacttcttaacctcttctttacccttccttcaatagctttcctattcctgacttctttattttgaattatcttttggttttctgggttttattattttctttttctttttcttttttttttgagatggagttttgctcttgttgcccagggtggagtgcaatggcgtgatcttggctaaccgcaatctctgcctcctgggttcaagcaattttcctgcctcagcctcccgagtagctgggattatagacatgcacctccatgcctggctgattttgtatttttagtagagacggggtttctccatgttggtcaggctggtcttgaactcccaacctcaggtgatccacctgcctcatcctcccaaagtgctgggattacaggtgtgagccaccttgcccggtctgggttttattattgaaaagcattttttaaaagaaatgttgatgaatcctacagtccctgaatttaggtacttctatgcacacaaggaagattatgtgagatgatggatatgttaacaatttgcttgactgtagcagttattccattgtgtatatgtacatcaaaacattttattataccttaaatacatacaatgaattttttagaaggaaaaaaagctaaaaacaatgacaaaaataaaaaacctcacatccgtttattaggtataaagtttttaagtcatacttttatgccctcaaacctctgcagatgctatgctggtcttctgatatcaaatattaatatggagaaatcaatgggggcagtctgatattctccctttaattggtaacttggtattactggcgaggcacttatataattatccttcttaaatgccttaagttgaagatctttatcacaatatatctagattttcatctttctctactaatgtttttttgaaagccatatacttttcaatcttcacattcagtattttttctttattatatgatggatcatttccatggtacattttttctgttctctcctttaaggatgctacttatcgttatgtttacttccattgtgtgtcatacataacaatcatctgctctaaattgtttctgactctttgacctttttcctttgcattttgggtgatttttctattatcctatcttgaattctccctctttatattcctgctgttgtcagttctgtcctggctgtttcttatctatttaataagaacataatccaattattctggttcacaacttattaacttggctctgcaattcttccaatcttatcctgctaaattttcatctcatctttggcttttttgagactatgatacatctgtggtctaattttttttttaatgtttctaaaatgtcttcttctgagatgaaatcttttttttttttttttttgagacagagtctcgctctgtcgcccaggccggagtgcagtagtgcgatctcggctcactgcaagctctgcctcctgagttcacgccattctcctgccccagcctcccgagtagctgggactacaggcgcccaccaccacgcctggctaattttttgtatttttagtagagacggggtttcaccctgttagccaggatggtttcgatctcctgacctcgtgatctgccccgcctcagcctcccaaagtgctgggattacaggtgtgagccaccgcgcctggctgccttgagccctttcctaagggtactaatttcattcatgatggcggagccctcatgacttaatcacccctcgaaggcccaacctcttaataccatcactttgggggttaagtcccattgcatgaattctggagggacacataccttcaaagcatagccgtccccgttgctagcttcagaactgctattcttggtcatttaaaagtgtatgtctatttgtggttgtcattctattcaatttggggagagagacattgagtgagcctgcatttactttaccatctttcctcggatgtttcagataattttagagcaaacctcacaaaataatttagttattcaattccatatttcaaaagtagctgtaattactctttgcggcacattttcatatcaccgtttccttacattacctcatttaatcctctggcagcctattgagataggaattattatgcccattttctagtggctttcactcatccatagcagtgagttgatgtggattagatttgttcaactctaaattttgtgtcttttccactacactgcacttcttttcaaaaaacgaaataataacctcctggctctatgctggcgagtgcgtttgtcagagaaattggatgctacaaggcatcacttactgtatctactctacctaagggcatgtttaattgaacttaattggaacaactacccagggttttaaatttttattattattttttactagctcactcttaagccaaaaactcaccctcatttaaagcaggtgttattataaattcaactatatataaatgtggtgttcgtctctgttggaaataggagaaatataacaaaagcactggctcaccattgggttgggattttcagcctgcctcctttttccgttccactgtgggatggaccactttcttgttatgcagaggaaaaaacactgtgatccttgtcttggctgtgtgaccagaacaagttacttaacatctctggtcttcatctctctctgctgggaatgaaaatataaggtcatatactcttcctacctttaaggtttcagacttcatgaaatccaagtctgggaactgactccagaccatagcttcagcatgggctttgctatattgctgggcagtcttgggaaagttccttcctttctttgggtctcagtttgcccatctgtaaatagccttgttaggtaagttcagtggttttcttttctttttttttttgagacagagtcttgctctgccacccaggctggagtgcaatggcgtgatcttggctcactggaacctccacctcctgagttcaagcgattctcctgcctcagcctcctgcgtagctgggactacaggtgcctgccaccacgcctggctaatttttgtatttttagtagagacggggtttcaccaagttggccaggctggtcttgatctcctgacctcaggtgatccacccgcctcggcctcccaaagtgctgggattacaggcgtgagccaccatgtccggccagctcagtggttttcaaactgtgttccaaggaacactaggaactgtggaggtggaaacagaaagactaggcttgtgctttatatagtccacctctgggtaaggttacatttgtaaaaagtgttctattgttaacaaatgaaaaaattgttctgagatatttcgtcccatacagtctctccctgaaggagatttctccaggtgaacgttcttagaaactaaaacttactaccttaagcaccattttggtttgatattgaatggaaatcaatataaagtggaattagacatcttgccttatttacagtaaggcactgaacattaactttttcttgctgttaaggatcactattttgaatatcaacgtgactcactgatgtcttgaagacatgggcaggtgaaaatgaccctcggccctttccatgactgtctccacatgactcttccttccttccttccttccttccttccttccttccttccttccttccttccttccttccttctttccttcctcttgctctgttgctggagtacagtggcacaatcatagctcactgcagccttgaactcttgggttcaagcagccctcctgcttagcccccgagtacctaggattacaggtgcgtgccactacacctggctaatttgtaaattttttggagatgcagagtcttgctatattgcccaggctggtctcaaactcctggcttcaaggggtcctcctgcctaagcctcccaaaactttgggatcataggtgtgagccactgtgcctgccaagtatgcttctttagtttgtatactgttttctgtgattccctctttaccccatggctgtcaggaggtctgaagtccttactcctttttgcattgaggggtcctcctaggctctgagaagaaagtctccccatctttgtagcctacttttctctccacaaatttagagccagaaacctggttgtctcaggacatctttcttttttttttttttgagacggagtctcgctctgtcgcccaggcctagagtgcagtggcacaatctcggctcgctgcaagctccacctcccgggttcacatcattctcctgcctcagcctccagagtagctgggactacaggcgcctggccaattttttgtatttttagtagagacggggtttcactgtgttagccaggatggtctcgatctcctgacctcatgatctgcccgcctctgcctcccaaagtgctaggattacaggcgtaagccaccgcgcccggccgtctcaggacatctttattggttactccaaagattacctccaatctaacaccctcccttcacttccccagcgacagcctctttcctgcgaagccttctcctctctgtgcatggcaggaacccgtgactcattttggattctcccatcttcctcagcttcgccatccaattagttaccctggccagtcctggttctgtccccaagacagcttgataactttcagcacatcctttaacctctctgggccttagtttcctcaggaaggaagaaaaggaggtacagaaagataaaaaggaagaaacgtttactgagctccttctccttgctataggcaaggaatttgacaccaaccagattggttcagatccatccttgctacttgttagttttgtgctcttggcaaaataacacattccctttctgagcttgtttcctcatctctaaaacgggggtggtaatatgtatgttgaggaagaaatgacagtgggcctggcacgtagtaagcatttggtatatgttagccagcgtgcctgtcctccctcctgtctcccttccgctttccttccttgcctcattgagagcctgtttggctgtatttttccatccaggcaattactctccccacaagtgtgtgcattgtttgggagtcgggctgtgagatgaggttatgagttgcaaacacaacagctcctccagcttctgtcgctggcctacaaatgtcacgttcatccaaatagcaatttcagggcacacttctttcctgatttgttagtacttctgaaaaattaaatggagagaactttgaggtgccaaggaacatgatgaactcattgcagaagcagagccagctcttcctccaccctccaaagctctaaaattagactcagcaaaccctgcgaggagagctcagcccactcttgaccccaaagcaaagggtgtcctgtttgccatgaggtcttgggtagcctgaaggcctcagtttgggggacagaccctcaagactgaagcagagcctatgacgtctctccctccctctgtctacttccatctggaactaggtgccactggagatgctgagcagtgacgagccacatttaattgtttcctcttttagaatcaactttattggggtataattgatgaatgatcaaatgcaccaggccgggcatggtggctcatgcctgtattcccagcactttgggaaggtgaggtgcgtggatcacctgaggtcaggagttcgagaccagcgccaacatggtgaaaccccgtctccactaaaaatgcacacacaaaataataataataataataataataataataataataataattagctgggtgtggtggcacatgcctgtaatcccagctactcgggtgactgtggcaggagaatcacttgaacctgggaggcggaggctgcagtgagccaagagcgtgccactgcactccaacctgggcaacagagtaggcctctgactctaaaataaaataaaataaagcgcacccatttcaagtgtccaattcaatgggctttgacagatgtccacattcatagaactatcaccacaataaaaacatagaacatttctatcaccccagcaatttttatttaaaattcagaaatattataaccatccagaaatgttcagagattaatataatgaaataatgcttacaaatctaccaccaaggattagcagatgttactgtgttgctacatttgctgtgatttgtcctcatttctttctctctctctccctcccttcatgtccactctgagaaagaaagaaaattaaataaaaactcttttaaagaaatgaaacattatcagtacagtcagagccttccttatcccaatgctcatagataactactgtcactacccatgttttaaagggacatgtcttactcatgtttaaaaacttaactgccctgtgcatgatcacaaaaaatatacagctttgttaggtgggcttttgacatttatgtacaataatggtgtatgtgtccttttgtaacttactgtaacttgacatgtgctttaaagattcattcaccttttttacaagtagatctagttcatttgccttaaattagtattctagtgtaagaaggttttaaaatttactaacccaatcccctactgataggcatttaggctgttctctttctcttcccaataacatcagtgctgcagtgcaaatcctgagcccatgtataggaattactcttttgggatatttatctgaaagtggaactgttggctcagaaggccccagggcatgaacctctccagctttgctagatattgccaaattgctctcccaggtaagagtatcaacaccctcttcctaaaagttcctgtctttcccatctcctctgcaacatttggttagatttttttcccccactctgatgtttatgaaatagtcttttggttgctttaatttgcatttccttggtcaacagtgaagctgagcgtgtatttataaatttattgggctttagagtttcttctgtgaatgcttgtggatgtttttgtctctttttccgtttgctttttaaattggattgtaaaaattctttatgtattatagatattaatcccttatcagttatatgtatcgtaaatattttctccaagcctgtggcctctctcttaattttggttttggtgctttttggtcatagaaattttaagttttaatgcagtcaaatttttctctgtggtttatgctttttgtgaattgtttaagaaatccttctctactccaacaacattttctacactttcttctaaaagagataagggttattcttcccatttgacagataaggaaatggaagaggtgacttgtccaaagtccacggatgtaggtggcagatccaggactggcccgctgtgtgctgattctaaacccagcatgcttttcttcacttggggccctggtgttgagagccggatctgggaagcagatgatcgtggttcagtgtggtcttgacctgtggtggatggacactgggcggaccatgtcctctctctgtggctcctcttggtggtcctatggtcagggaggctcatgacttttcctttgccggatgtgtcagtgaatactgagttcctaaaggtcagctttggaagagatttggggccatgtgttatacatggagaaactgagaccctgattgggggagaaagttgctctggacttgcccgtggcttatcccacctgccaaggggcacagttccagcactgcctggctcccattctgaacccacttgggcctcgccatcctggcctggccactggacaacagtagccaccaatggggaggacacaggccacctgccaggtgactgcacatctgccccttgactttgtcctcatagcagccttagggctggcaactgtcatctccattttacagaggaggaacttgaaatttagagagggtaattgatttggccaaattcatacacagaggcaggaaaccctgatccccatgattccaaagctcatcctgtgtgacccaggatcctgctctgtattggaggtgactgagtcaacactgaagaagcagctccttctctgattgaccctcaactgttagagaacctgtgtccccagccccacgtagtcacctctgccctgagcctctcctcagtgtctcagagcctcaaaccctgactcagtctcttgtcttatttatttatttatttatttatttatttatttatttatttatttttgagacagagttttgctcttgttgcccaagctggagtgcaatggtgcaatatcagctcactgcaacctctgcctcccaggttcaagcgattctcctgcctcagcctcccgagtagctgggattacgggcatgtgccaccaagcctggctaatttttgtatttgtagtagaaacaggggtttgccatgttggtcaggctggtctcgaactcctgacctcaggtgatcctcccgcctcggcctcccaaagtgctgggattacaggcgtgagccactgcgtccggcttggtctctcgtcttaaatcaaggaggttttcatagctcatggcccatccacacacagcctctgccactcccacatcagactgagtgggcagggaatgtcctactttcatccattcattccatcccttattcacttaattttaactgggcagagagtcagggtgacgtgtggcctggtcagagtcctgtgccatcttacttaactctcagagcctcagtttcttcatgtataaaataggcacaatgaacactcaactcctcaaactgctgtgaaggttaactgagaggaacaagcctgtggttatgattccatggccagtttaccatggggtctgtgactgctgcctcggctctaccatctgagctcagggctgcctggcctggaatggaggggtgggtaagagcacaggctctgaagccagagtacctggattcaaatcctcccaccaccctgactagctgtgtgattttcagcaatatactaagctttttggtgccacatttcctcatttaaaaaattatgttaataataatgcctaccctatgacattgtcatgaatacgaaaaaaagttaatacatgtgaaacacaaagaaccatgtaattatagacaaaactgtgtctcctccaaccccaccccagattcatatgttaaggccctctcaatttgactgtatttggagatagggcctttaaggaggtaattagggtgatatggtttggctgtgtccccaccaaaatctcaccttgaatcgtaataatctgcacatgtcaagggtggggccagggggagataattgaatcatgggggcagttttccccatactgttgtcatggtagcaaataagtctcatgagatctgatggttttataaatgggcattcccctgcacaggctctcttgcaggcaccttgtgagacatgactttgctcctcattagccttctgccatgattgtgaggccccagccatttggaactgagtcaattaaacctcttctctttgtaaatgacccagcctcgggtatgtctttattagcagagtgagaacagactaatacatagggttaaacgaggtcataagggaagtgggggcggggctaatcagatgggattgatgtccttgtaagaagagaagagacaactgagatagctcttccccccatgacctttccctctctttcttgtgtgcacagaggaaaggccatgtgaggacacatcaagaaggtggccatctgcaagccaggaagtgaggcctcaccagacgccagccctgctgactcctgatcttggactttcagcctccaggacagaaataaatttctattgtttaagccacccagtctgtggtattctcttatggcagcctgagcagactaatatgccaaactcatagtttgtgctgaagaaaagctaattatttgataataattttatttattattattaatacaattgtggttgtaactgaaagaccagattcaggtatctcctgcagtgttgataagggggtggcagggtgagggactggggctagtatcagcaccctgcccaacaaaggacttcccctcccaggcagccaacagaagaggctgggccaggctgcaggtggtcggggaagcctggcttccttgtcacttctgcctctcatcaccggtgcacaggcctgctcagggccaagggtaccagaaagctttgcctgtgctgtttctctgacccagtggcctctcctttttcaattgcctaactccaggacagaaataactctgatgcccctttcagacctgccccctagggcacccccttagacattggtcagtaacaggagagaagatcgacagattagaggtgggggcatgggaagctctcttctgattgtttctcttttacaaaatgaaaagcaaggtcaacagctgagaatgggagggggtgggagttggagatttgaggggagcggagataaggaatacaggttatcttacttttggttgctcaaaagcagaccccaagacaaggatcccagagcacgtagtttatttgaaaggtgatcccaggacagccaggtaggggactaggagggtgaggcaggaagggaaaggagccaagcccattacgatggtgggcagctgaatgcaggtcaatcccactgggctatcgtgggtgccacccaagatgggaggggaccggagtgatctacattccagctaggggtggtttttgcttaaaggttgctcctggttgagaggtcaaatctctgcctccagccctgctccccaagaaagccctagccatgcagatgagggcaattagcattggggcagcaaggaaagggtactggccaggggttgtgggtgggaccctgccaacatctgctatggtgaaggagtgaattaaccagcagtaagtagaggtccctcagggctaatgttgattggtttaaagtgaaccaaagagcataagttgccaaaggaccttagtcatcgcagactaccatgcctggctaatttttgtatttttcgtagagatgggatttctctgtgtttgccaggctggtctcggactcctggcctcaagactggcttacagatgacatgaaccataaggcccctagaagaaaagacacttttccaaaatcactcttagcatggtcaggatggcagatcacattcctctggaaccttgcacagaagaaaaaataaaaaaaagtttaaagcagtttttagtatacaaaagtaaaacatgattattggagaaaatctagaaaatatagacagaaaatttaaaatcacacagaaatgtgtaacccagagacaaccactgtcaacaatggatctgtatctttctagtctatttcctaagcctatgtgtattcatatagtttttttcaacaaaatttcaatcacattatatgtaatagtacatactgtcctctaacatgattttttcatgttacagtataatcatgtttctctttccatatcattgaatatttttctgcataaatgtctagggccacacaatattccattgttaaacactgaaattgtttgtattttttcattattataaataccactgcaatgaatttcccagaaattcactctgagcatgaccatgaatatttcctaagaataaatccctaggaatggaattgccatctcaaagggtaagcactttttaaggcatttatttgataatttgccaatttgataaactttgctaactttggaaacagcatgactgtttattcaattgctcagtccaaaattcttgagtcattctgtgtataatagttctgtactttgtggtaggatttctgtagggtcctttcaagtgggacataaaaaggaatgttcatttgccattttgataacactgccaaattatcttctaaaagtatttaaccaaattgaatgttcttatctaaaaacacactatttctctctctctctctttttttctgttaaatgcttcaggagagttaaattgttgttcctttttcatagacatcatgcacattataaactttattcttaggtatcttttgagttttattgctggcatgaatgaaattttaaaaatcggtcatattttctagttggtcattgttgaaaacctaagaaaactatagattttagcatatttatttatttatttattttagtattattattattatttttattatactttaagttctcaggtacatgtgcacaacgtgcaggtttgttacatatgtatacatgtgccatgttggtgtgctgcacccattaactcatcatttacattaggtatatctcctaatgctatcccttccccctacctctacctcacgacaggccctggtgtgtgatgttccccaacctgtgtccaagtgttctcatggttctattcccacctatgagtgagaacatgtggtgtttggttttctgtccttgcgatagtttggtcagaatgatggtttccagcttcatccatgtccctgcaaaggacatgaactcatcctcttttatggctgcatagtattccatggtgtatatgtgccacattttcttaatccagtctatcattgttggacatttgggttggttccaagtctttgctattgtgaatagtgccgcaataaacatacgtgtgcaaatgtctttatagcagcatgatttataatcctttgggtatatacccagtaatgggatggctaggtcaaatggtatttctagttctagatccttgaggaatcaccacactgtcttccacaatggttgaactagtttacagtcccaccaacggtgtaaaagtgttcctatttctccacagcctctctagcacctgttgtttcctgactttttaatgatcgccattctaactggtgtgagatggtatctcattgtggttttgatttgcatgtctctgatgaccagtgatgatgagcattttttcatgtgtctgttggctgcataaatgtcttcttttgagaagtgtctgttcatatccttcgcccactttttgatggggttgtttttttcttgtaaatttgtttaggttctttgtagattctggatattagccctttgtcagatgggtagattgtgaaaattttcttccattctgtaggttgcctgttcactctgatggtcatttcttttgctgtgcagaagctcttcagcttaattagatcccatttgtcaattttggcttttgttgccattgcttttggtgttttagacatgaagtccttgcccatgcctatgtcctgaatggtattgcctatgtttccttctagggtttttatggttttaggtctaacatttaagtctttaatccatcttgaattaatttttgtacaaggtgtaaggaagggatccagtttcagctttctacatatggctagccagttttcccagcaccatttattaaatagggaatcctttccccatttcttgtttttgtcaggtttgtcaaagatcagatggttgtagatgtgtggtattatttctgagggctctgttccgtccattggtctatatctctgttttggtaccagtaccatgctgttttggttagccttgtagtatagtttgaagtcaggtagtgtgatgcctccagctttgttcttttggcttaggattgacttggcaatgtgggctcttttttgcttccatatgaactttaaagtagttttttccaattctgtgaagaaagtcattggtagcttgatggggatggcattgaatctataatttaccttgggcagtatggccattttcacgttattgattcttcctatccatgagcatggaatgttcttccatttgtttgtgtcctcttttatttcattgagcagtggtttgtagttctccttgaagaggtccttcacatcccttgtaatttggattcctgggtattttattctctttgaagcaattgtgaatgggagttcactcattatttggctctctgtttgtctgttatcggtttataggaacgtttagatttttgcacattgattttgtatcctgagactttgctgaagttgcttatcagcttgaggagattttgggctgagatgatggggttttctaaatatacagtcatgtcatctgcaaacagggacaatctgacttcctcttttcctaattgaataccctttatttctttctcctgcctgattgccctggccagaacttccaacactatgttgaataggagtggtgagagagggcatccctgtcttgtgccagttttcaaagggaatgcttccagtttttgcccattcagtgtgctattggctgtgggtttgtcataaatagctcttattattttgagatacgtcccatcaatacctagtttattgagtttttagcatgaagggctgttgaattttgtcaaaggccttttctgcatcttttgagataatcatgtggtttttgtctttggttctgtttatatgctggattacgtttattgatttgcatgttgaaccagccttgcttcccagggatgaagccaacttgatcgtggtggataagcttttgatgtgctgctggattcggtttgccagtattttattgaggatttttgcatcgatgttcatcagggatattggtctaaaattctcttttttttgttgtgtctctgccaggctttggtatcaggatgatgctggcctcataaaatgagttagggaggattccctctttttctattgattggaatagtttcagaaggaatggtaccagctcctccttatacctctggtagaattcggctgtgaatctgtctggtcctggacttttttttggttggtaagctattaattattgcctcaatttcagagcctgttattgggctattcagggattcaacttcttcctggtttagttttgggagggtgtatttgtctaggaatttatcaatttcttctagattttctagttaatttgtgtagaggtgtttatagtattctctgatggtagtttgtttttctgtgggatcggtggtgatatcccctttatcacttttttttgagtctatttgattcttctctcttttctcctttattagtcttgctagcggtctatctattttgttaatcttttcaaaaaaccagctcctggattcattattttttgaagggttttttgtatctctatctccttcagttctgctctgaccttagttttttctgctagcttttgaatgtgtttgctcttgattctctagttcttttaattgtgatattagggtgtcaattatagatctttcctgctttctcttgtgggcatttagtgctataaatttccctctgcacactgctttaaatgtgtcctagagattctggtatgttgtgtctttgttctcattggtttcaaagaacatctttatttctgctttcatttcgttatgtaccctgcagtcactcaggagcaggttgttcagtttccatgtagacgagtggttttgagtgagttttttaatcctgagttctaatttgattgcactgtggtctgagagacagtttgttataatttctgttcttttacatttgctgagtagtgctttacttccaactatgtggtcaattttggaataagtgtgatgtggtgctgagaagaatgtatattctgttgatttggggtggagaattctgtagatgtctgttaggtccgcttggtgcagagctgagttcaagttctggatatccttgttaactttctgtctcgttgatctgtctaatgttgacagtggggtgttaaagtctcccattattattgtgtgggagtctaagtctctttgtaggtctctaaggacttgctttatgaatctaggtgctcctgtgttggatgcatatatatttaggatagttagctcttcttgttgaattgatccttttaccattatgtaatggccttctttgtctcttttgatctttgttggtttaaagtctgttttatcagagactaggactgcaacccctgccttttttgttttctgtttgcttggtagatcttcctccatccctttattttgagcctatgtgtgtctctgcacgtgagataggtcttctgaatacagcacactgatggatcttgactctttatccaatttgccagtctgtgtcttttaattggagcatttagctcatttacatttaaggttaatattgttatgtgtgaatttgatcctgtcattatgatgttagctggttattttgcttgttagttgatgcagtttcttcctggcatcaatggtctttacaatttggcatatttttgcagtggctggtaccggttgttcctttccatgtttagtgcttccttcaggagctcttgtaaggcaggcctggtggtgacaaaatctctcagcatttgcttgtctgtaaaggattttatttctccttcacttatgaagcttagtttggctggatatgaaattctggtttgcaaattctttcctttaagaatgatgaatattggcccccactcttttctggcttgtagagtttctgccgagagatttgctgttagtctgatgggcttccctttgtgggtaacctgacctttctctctggctgcccttaacattttttccttcatttcaactttggtgaatctgacaattatgtgtcttggagttgctcttctcgaggactatctttgtggcattctctgtatttcctgaatttgaatgttggcctgccttgctaggttggggaagttctcctggataatatcctgcagagtgttttccaacttggttccattctccctgtcactttcaggtataccaatcagatgtagatttggtcttttcacatagtcccatatttcttggaggctttgttagtttctttttactcttttatctctaaactttccttctcgcttcatttcattcatttaatcttcaatcactgacactctttcttccacttgactgaatcggctactgaagcttgtgcatacattatgtagttctcatgccatggttttcagctccatcaggtcatttaaggtcttctctatgctgtttattctagttagctattcatctaatctcttttcaaggtttttagcttctctgtgatgggtttgaacatccttctttagctcggagaagtttgttattactgatcgtctgaagcctacttctgtcaacttgtcaaagtcatgctctgtccagctttgttctgttgctggtgaggagctgcgttcctttggaggagaagaggcactctgatttttagaattttcagcctttctgctctagtttctccccatctttgtggtcttatctacctttggtctttgatgatggtgatgtacagatgggattttggtgtggatgtcttttctctttgttagttttccttctaacagtcagggccctcagctgcaggtctgttggagtttgctggtggtccattccagaccctgtttgcctgggtatcaccggcggaggctgcagaacagcaaatattgcagaacagtaaatgttgctgcctgatccttcctctggaagctttgtctcagaggggcaccgggctgtatgaggtgtcagtcagcccctactgggaggtgtctcccagttaggctacttgggggtcagggacccacttgaggaggcagtttgtctgttctcagatctcaaacttcgtgctaggagaaccactactctcttcaaagctgtcagacagggacttttaagtctgcagaagtttctgctaccttttgttcagccatgccctgcccccagaggtggagtctacagaggcaggcaggcctccttgagctgtggtgggctccacccagtttgagcttcccagccactttgtttacttactgaagcctcagcaatggcagacgcccctcccccagccttgctgccaccttgcagttcgatctcagactgctgtactagcagggagcgagtctccttgggcatggcaccctctgagccaggcatgggatataatctcctggtgtgccatttgctaagaccattggaaaagcacaatattagggtgggaatgtcccgattttccaggtaccatctgtcacggcttcccttggctaggaaagggaattccctgatcccttggaccccttgtgcttcccaggtgagccgatgccctgccctgctttggctcacactccgggggctgcacccactgtccaacaagccccagtgagatgaacccggtaccttagttggaaatgcagaaatcacttgtcttctgcgttgctcacgctgggagctgtagactggagctgttcctattcggccatcttggagggtgacttcagcatatttatttttaggccgcctgccttactgaatctattatgatttctaacaggttttcaattcattttcttgttttttttttcccctaggtggaaaataataaaatgtttaaatattaatcattatacttattttcctaatagttgtatctctaatttcattctcttgtctagtgacatcggtagcacctccagaagagagaacaaaagcagtggtagcaccaatctccttagtcttttctcagattgagggggcatctcatgtgtgtcttccctttgaaaatgatgccaacactcatttgacgtacacgtgcaaatgtttttgttgtggaactatccttctattcttgttttatgaaacattgccatcggggatagatatattacttttaaaaattgtattttagagccctgtgtggggctcatgcctgtaatcccagcactttgggaagctgaggtgggtggatcacttgaggttaggagttcgagaacagctagaccaacatggtgaaaccccatctctactaaaaatacagaaattagccaggtgtggtggcacgtgcctgtaatcacagctactcgagaggctgaggcaggagaatggcttgaacccaggaggcagaggttgcagtgagccaagatcatgccactgcactccagcctgggtgacagggcaagactcagtctcagaaaaaataaaaaattgttttttagatatttattgaaacttttttccttttatattaacagcctaccaaattttgaataacccttgcttattctcacaatttttcttttaatgttctatttagtttatttgctaatattttgttattttgcatgtatattcataattgggtttgtagtcttccattttgtgcttgtctactttttaaatatttaattctgcataatttgtaacattaattgaaaattttctttcattatgcattgggatgatttaaagggcaacagatttctatgttgtttggatttttgaaagagttctacttcatctgatgtgattgtggttctgctttctgcttatttgtttttcctggaacaatttttttgaacaagttttgctggtcctcttactcatagtctttctgaatcattttattttacttaagtgtttgtggagttatattttatgtgttaatttaagcttttaaaaaatatctgtgtttattccattttcatttattgtcatagtaatttctgtttaaaaatgttcttaggttattttgtttgttgtgattcatcacagtataatttcctttatatcttttgctttactgttcataatttttaaagtaattgaatgcccatatagattctgcttttagatctattgataattgaataacttgatcaatcctcgttctccagttcatgagttctagcagtaaggccttcccctttgtctttctctatgaaagagaaggccaactgcacgtttttgcttcctctcattctctcctccgtcaatatcaattccaaatccacctcacccgatttgtgtatcctgaatttttgccccagcctattataaggaacttatcattaatatttgtattaggtgtctttctttgtcaaggaacttaatgtttttgttctttcttataacaatactttccatggctatttagtcttcatttcatgtttggaatttggatgcagtttggatggatttggctcttaccccaggctttctgcaacacagacttcatgttcagaaatatatacttattcaactagttcttgagagagtgtttatgtgacctcctcctaaagttttctgatgtttaataacagcctgtttccttaccaggtgactggcactttgactgggcttagaatttgggggcttagaacttgggaccatattccttttcttcctttaaaacactgccttgtcttctggcagtgaattgtatggcagaaacatcagggtcgtttttcttcagtgtagatatttacagacatttttctttataactaaaatgaaataattttttatgagaacttgccttgaaactgcctcctttgttcctctttcatattaggaaagatctctccttttatgtttcgaactctgtttctgtctttttttttttttttttttttggagatggagtctcactctgttgcccaggctggagtgaagtggcgtgatcttggcgcactgcaacctctgcttcccacgttcaagcaattttcctgcctcagcctctcgagtagctgggactacaggcgcacactgccatgcctggctaatttttttgtattttagtagagatggagtttcaccgtgttgcccaggctggtcttgaactcctgagctcaggcaatccacccgcctcggcctcccaaagtgctaggattacaggcgtgagccaccacgcccagcctctagtctcttctttaggagcaccaattatcctatactccatctctttttctttcctctgtggttttcctcaatcctttgtcttttgcttctacgttctgcattattttctctcaaggaccctccatcttgacaacctgggttccttcaatgatgaatccgttctcccttcctacccatttaaaaaatgttgcagtagcgttgcttgacctcttactgttttttcttagcattgcccattcttttgtaaacccaatccatagttacaggagctcatttttcatccatttttttctttggagtccttgaactttttcccatgccactgagaatagaaagtagatttgccccaaattttcatctgttttatgggttcagtttatagaaatatggtcttcatctctctacgctgctgtgttcatttccttgtcattggttgctaagttcttgcttctcactctcttctcacctttgaataggattctatttaggatttgtacttgccttgggctggcatggatagattttccttcatgattcctcacactttgcactctacccttaggtatttgggtagcttcagaatcgtcttactagaactctataagtgaatatatatctggatgcattttgagagattcagaaggatgcaaaaccaatagaaaatattggttactttaaggtaagattggagggaaatactattgacctttaatttaaaaacctctcttaaaaaatgggcaaacattaagaatatcagatagaatgtacaaatgactaatctgctatgtaaaaagatgtttgaccttgctgatagccagtgaagtgcaaactaaaaccacactaagacatcatcacttgcacatcagattgaaaaagatttacaatgttataatgtccaacatggtaaagatgttgagaaagatgcactatttcaagatttttttttttaaaggaacttggagactggatcaggtaacttaattttaggaatttaaaactcagactgaaatgggcctatggacaaagtgggttaatttagtctttattttgtttttgctaaataaatatttcatgtatgtttaagaaaccttataaacaaattcagtcacagactttagtttgcattaggattaccttcagtttttctgtacttttatgttttgcctcaaatgtgatttcttcactgctttatcaagagctggacctgacatcaacattataaaataaatttacagagctcgagggcttcaagtgcctgtcaaggtgacccagaagcccacatcgatggttcttgccatgaactctactctggagaaaccacagaaataggataaaacacggactggaggaactaacaaaggagtgttggaagcccctggaagggtctcatggctgctttgagctggagtgtatgtatatgggtgcacacactcgtgtatgtaggaagcagaaaaggatgggacaagcaaaggcaatgatgggaaggtgggttagagcagtgatttgcaatcctggtgcatgttagatatcatctgagaagctttaaaaaatattcacaccagataacagggaaatataggagaatgtcctcctccttagctgatgttgaattactagctgtctgcaacttatttccaaatgcttcaacaaaacaaaacacctcgtaacagagaataagagagagagaatgagagcaactgtggcaacttttgatgaatccaggtgaagacagcagtgatgttctctgtactattttttttaagactgatttgttggtttgatttttgttttcaaaatacaatgttgagaaaatcaatactcacctccaagcctcatcccaggtattctgatttcattggtctgtgatgcagtggcatctgaaaaatgttccagatatgagtgtaatgctgaaccaagattaaaatccacagggttggcaggaagcttttaaaaagctcttctcttgctgcttctcctgaagtgccttgataccatctttgacttccacttcaccatagaaattggaagcaatagtccaaacctccagtgccagtaaacatggtgctgggtgctctgctgagtgaggaattgatgcaaaatgaaaccccaactagaggagctgtcagttacaatggcagcaaagagcagtggctaactgttgttttgtggtacttgagcttctctactcagaggctcatccctctccttaactgacattcatccacagggacacagatgagagcctggcccttgaggtttcattcatactctgctaaacaaagtagttgattccactgtgggaaaatgaattcacaggccaagatatctagacacctgagaaatacctgtcttgttaaagagaaagaaaaaaaaaaagacaaatggaatgcattccacctgaagcagcattattgagagatggcttcagaatttaaaataaacattatagaaataattaagaaaataagagatgattttaagcatatgaaggaaaagtaagaaatcatggacaagaaccaagtggaaatatcgagtatgaaaagtataatagttaaagcaaaaaatacaagagatagaattaataaaaggatggaaacagctgaagaacaaattaatgtaatggaggattaggtagaggaattattctgaggcagtaggaaatgatgaagagggagaaaaatatatattttcaaaatgctttgaaatatggaggacagaagtaaaagtgttaatattttaaaaatgaaaacactaagagaagaaaaaaactgagaagatgaaatatttaaagaaacagtgaagattcagcttcctaaaattgaagacaagtctctggcttgaaaagtcctatagaacaccaaacaaaagagataagaaaaacctatacttagctgggtgtggtggctcacacctgtaatcccagcactttgggaggctgagacaggaaggttgcttgtgtccaggagttcaagaccagcctgggcaacatagtgagaccccttctctacaaaaaataaaaaatcagctgaatgtggtggtgtgcacctgtagtcccagctacgtggggggcctgaggcaggagaattgtttgagcctgggaggttgagcctgcagtgagccatgatcatgccactgcactccagcctggtggatagagtgagattttgtctcaaaacaaaacaaagcaaacccctcaaaaaaacctgtagctatattagagtgaaacgtaagaacatcaaagacaaattctaaatgtttttgaagttgaagcagattgccaacaaacaagaatcagaccgacgtcaagtgggtactacaagtgatatgaaaaacacggaagactagatataaatatagtcaagttcaagaaataaataaggataaataaacttgagtatgggtcttaaattaagggcaactgacacaaggcccaaagcaaaataaataaattttgaagcagcaaaaggaaattctccctacccaaaagaaagttggatagaagaaggaaaaaagaaaaatccctgtaagtgtaaattgtgaaatacattataacaataataataataaatgaaaatggattaaattcactaattaaattcacagacagctcagagtagattttttaaaagaaagagacaatattatgtttttaaaataagaaataagcaatacaaaaaggcaaagaaagttgaaaaatcagactggattccaggcaaatatgaaaatattgataatctggcaatttcaacacgtgacaaaataccatttaatgccaaaacatcataatgaacaaagcaagaggttatatactaataaaaggaacaatataacaaaaaacccaatacaaatatatacgcacctgaaaatagacactaaaaatatatcaagcaacaagtgacagaaccacagggagaggataattcattattcccagttgaatcttttattgtattcctccaaggaatggacagattaggtagtctaaaaatgatcagaaattattttttaaaatcttctctttgctcctagtgttccgaaatttcacgatgatatgtttcagcatgggtctatttttgtccgtctcacttggtactcatgggccttttcaatctggcaattcttgtcactctcttagggacatgttttattgttgttttgttgctgatgtactcccctgtgtttctctgttctctctggaactcctcttatttggatggcatcttctggatggtttctctagttttttttgttttgttttgttttgttttttatcttttctttcctattatctatatctttgtctttttgatctactttctgggagatttcctcatctatagcttccaagcctgctgctgactttaatttttttcatatcgtatttttaactttatgagcacttttttggtttcagaatgtcgcttttcttaaaatagaatcctgttcctatttcatgtttgcaatacttcatccctttgagggaactaatactttttaaaaaagagattttcttctttctggataatttctgtttctctaaatacccctgtactggtttttgttgctgctgtaaaaaaaattaaaacaatgtaagtgtattatcttatagttctgtaggttagatgttcaatatgggtttcactgaactgatatcacagtgttggaaggatcatgtttctttctggaggttctagggctaatctgtttccttgcctttttcagcttttagagaccagtcacatttcttaactcatagcctgtttcctcacatctctctgtctcttttctagttgccacatctccctctgaccatggcaaagaaaagttcttggcttttaaggacacatgtgatttgactgggctcactaggataatccaggataatctcctcatctcaaaatcagatcattaacaactttaattccatttgcaaccttaaatctgcaaaagtgccatgtaacataatacattccctggttctggggattcgaacatgcacattttgggagggcattattctacctaccatatcccatccccataacctctctctttttttgtttagttttgttctctgattttcactttggaggttttcctcacatgtctggtaatctctagctatctgcacatacttaggaatgaaagattaaaaagtttattggaagctctgaaaacatgagtggagcttattggctgtataactgtggattatttgacagactatttccctgggcaatccccatgtcagtatatcagggtctttcttgttgggctggtcaattccccagagaagacttgtacagtctcctccctaaaggcagaaggcctggccacccgagttacactatctgagcaggggaagaggcttaagaatctcaagatctgggatgtgtgtgtttagacttaataattctcttgtgtctgtcaattatacctgtcatcccttttgcaaaaactagacattcagtcatctgcctgggtgtaaagattcagggggaaaatggggcagaggagttcaaatgtctcttaaacagaccttcagcaactcttgaatttttagtcaaatcctcacctttacttccagagatcctggacagcaattgctgagtgactcgggggttctttagtataaactgggttggttcttgaatttaccctccgtgggcttataactcaactttctcagtcctcggcttgtctatctgctttccagtttccaaaattttgatgttgctttttcccattggtccttgccttattggttttttgttaaaaccctttattgttgctataatggcatttccaaagaaagcagagctcaaagcttgggttcaattcattatttttttaactggaagttggtacattgttccatatttgttgaacccactgtgcaacgtgagccatggaagtgccctgtcccactgtggatgcctcttctgactgacatatttctcctttttgggggcggaccaaccatatcaaagagatgtcaaactaaaggaaaagctcataaccataggctttctgtgttgaaggttgctatgacttttaatggcaaaaaccacaattatgtttgcaccaacttaataatattcccaacccaacaggtatttgttgaagatattggtctatcgctctgaaaatatttcccaaatgatattttccagcctccctgattctgcctttgccttcctgacatccatgtgtgtgctcacttgtgcgtgcttgcacacagacatacacacacacacacacacattttcttccttttttggagtgtacccttatcagtattaagaatctgactcagaacaatggggagggctttagtcttcttgttcagctattaccatggctcagaatgctgtctatgtcaggagatgaatccctgatttttttcatggcccgtccatgtctttccctcatgccaccaaattgaagataatgatataactttgcatttagttttatagccataggaatatccagcaccatatatgtttaaatacaggataacccagaacataaaacacctccattccttttccagttgagaatattctccagaattttggccaatttaagtataaataacctttagaaccttattgaaattgatatttacttatacattttattggagtagtttcattatatatacaatttaaaattatatattataaaggtaatttaatttactgcttttttcctactcatataataataaagttgtaagaaacaattttactgaaactcctcactggcgtcttggacattagtgtctctgtcgtcagtagatccattttttttaaatcgtccagcacagttttccacagtacattgtgttcatttccatttgagtcattgtgacacgtttatgtttgtatctatatgtttgctcccacggaaacttttatcccaagccacaatagcccattatgtgcggacagatttttggttgtttaatttgtcctgatggtatatgtgcatgatttccacagacaaccgttttctgtattgattttcaagtgagctttagaaggattgtttacaaagacatttgacacttgcaattgtgaggtgatagacctttagcaataattactaaatctgtgtcaaatttctttgccttccttatttactgattctgtcaggtgacatctctaatcattgcaaaccagtgttgattgaggtcatttcaggctgatgtttctttgccaaacaagatttttgttcaaaataaagaatttgaggctgggcacggtggctcatgtctgtaatcccagcactttgggaggccgaggtgggtggatcacctgaggccaggagttagagaccagcctggcccacatagtgaaaccccatcgctactaaaaaatacaaaaattagctggacgtggtggtgggcacctgtaatcccagctacttgggaggctgaggcatgagaatcgcttgaacctgggaggcagagtttgcagcgagccgagattgcgccactgcactccagcccgggcaacagaacaagactccatatcaaaaaaaaaatttttttttgaaggtgcatttccataatagtgcctttccaaattggtcttcttgttcagccttattaccatggatcagaatgctgtctatgtagggagatgggtccttgatttttttcatggcctgtccatgtcttttccctcatgcctcttcttatagattacccagtctcaagtattctgttatagcaacactaaatggactaagacactttctcttcagacatccacaggactctctccataatatgagagatttttttaaggacgcaaatttagagtaattcttttctgagagttaatttttagaaattattgtatttggagtagatttcacactcggttggttttattgcttattgttggtccccttttatcatgatcttctcatttctgggtccaacactttggtctaatagccagtgggatttaagtgccatgattttaaacatcatttacgcactgatgattctcagtgttgtacctccagtcttgacattttccttgatcttcagtttatatattcatctgtcaactcaacacctcctaagcctaaacctaaattgatgtttaataggcatctcaaaattgaaatgtccaatacagaattagttctccaagagttggattttataaagccaggatgccccttgggtttagtctttttgcatgtatccactgcccatttgaccttctctaccatgttatgctgtagaccaatagccctcaacataagcctgagccatacccttgaacttcccagcttgcagaactgtgagctaaataaacctctcttctttataaattacccagtctcaggtattctgttacagcaacaacactaaacagactaagacagtcttccttcagatatccacaggactctctccatcatttaattcaggtctctgttaagatattatcttcccaactgcagtgccactccactgacatgcactagtcactctgtaacccttcattctgtgttatttttctttataaaacttaccattccatgctagtgcatatactagcatttactagtatatgctagtatatgcaagtatatgttagtatatgctagtatattatagtatatgctagtgcatatactatattatattactataatttaaatatttattatttacattatacttatttgtttattttctgtttttccaccagaatgtgggcttcattaaggctaaaactttgttttgttcatgatttattctcagttcctagcaccaagtctgtgttcaataaatatttattaaatgaattaacgaatgaacaaaccagttttccatacgatggatcacatatttagttctcctttcatcctttttcttttacccactgcattcctgctttctcttttataattttcacccttattcttttatcactgcattcctgacatcttatcaacatcgatgacttgatatgcatttgttttgctgcagtactttattactgtagccacagtctaaaattctgccatagcattgtttatttcttatattattagtttctcacagtaaaaacaatctcaaccaggcttctgttcatcccattcttctgcattattattttgtctctcatcttacattttataggctctacattttcttgaattttattgggaacttaaacttttcttttagcaagtgattttcttcagaagaccttttcttttgcttccctgcagagtgtttagcagtgtctcaacatccacacagaaccccaaagtgaagaatgggagatgtggtggtctgaggcatttaaggaaatctctctttaatctttagtggctgagctaaccaagcagagacttcagcggcaacatgtgacaaagaatatagactttacagaataattccaaaggacactaaaaaaaatggcagcagcaacaacaaataataataacaaactctggagagggggagaatctgatttccagagttgccatattatattattttaaaggtcaacttttttaacaaaaaatacaagttatgcaaagaaatcagaaaggatggcccataaacaggaaaaaggggcaaaaacaagagaaactacactaaggaaccccagatgttggatttattagacaaaggctttaaattagctatttaaaatatgcttaaagcatgaaggaaattatgtctaaggaactaaagaaaagtttaaaaatgtctgatgaaatatagaatatcgataaagagatagaaattattaaaacaaaaattctggagttgaaagtacagtagctgaaatgaaacattcacttagaggagctcaacagaacattttaacaggcagaagaaaaagaagtcagcaaacctgatgataggtcaaatgatattatctgtctgaggaagagaaagataaaaagaatgaagaaaaatgaagagtctcaaagacctatcaagcatactgagatagaccaagaatacaaaaatatgcataatgtgatttctagaagagaagatagagtggcagaaagaatatttgagaaaaaaaaggatggctaggttgggtgtggtggctcacgcctgtaatcccagcactttggggaggccgaggtgggtggatcatgagttcaggagattgagaccatcctggctaacatggtcaaatcccgtctctactaaaaatacaaaacaaaacaaaacaaaacaattagccaggcatggtggcgggcgcctgtagtcccagctacttgggaggctgaggcaggagaatggtgtgaacctgggaggcggagcttgcagtgagcctagattgcaccactgcactccagcctgcctgggtgacagagtgagactccgtctcaaaagaaaaaaaaaaaaagggatggctaaaacttcccaaatttgatgagaaacattaatctacacattcgagaatctcaacaaactccagctaggataaactaagaaagatccttacctagacacatcataatttaactgttaagaggcaaagacaaagagaatatcttcagagtatcaagagagaagtgactcaccatgtataagagagccttaataagattgtcagctcacttttaatcagaaaccatagatgtcagaagacagtgggttggtatagtcagagccctgaaagacaaaaaactgtcaaccaagaattctatatccaaagaaaactatcttttaaaaatgaaggagacattaagacattcccagaaagacagaaatggaggcagtttgtcaggtatttcagcctgaagcttttctacaagtaatactaacgaaatgttcagtccttcaggctgaaatgataggacaataggaagtaactcaaatcgacataaagaaataaaggtaactacataggtaaatacaaaggccaaaatacatacaaaaggaaaaataaatttatttttttctttgtaaccctttttttctcttatttgttttaaaggatagcgatatgaagcaaaaattatgaatctatgttgatggtcatacagtgtgtaaagatgtaatctgtatgacaaaaatagtacaaaagttggagagggaatgaagttatattggagaatggtttatgtatacaattgaaatgaaggtaataactaggttgttataaattaagatgctaattataatctccagggcaaccactaagaaaataactaaaatatatatagtgaaagaaatgacaaaggaatactagaaaatatctagtacaaaagaaggtaataatggaggactagaagaaacaaaaaaaagaaacatataaaaacaaacatcagaatggcagacataaagcctaccttatcagcaattatatgaaattactctacataatcaaaatataaaacttttatgttttgttggacaccactgagaaagtgcaagactactcagaatgagagaaaagttcaaattatatatctgataagggacttatatctagaatatataaagaactcctacagttcaacaataactaaacaaataacccaatttaaacattgtgcaaaggatctgaatatacatatctccaaagaagatgtacaaagacaataagcacataaaaagatgccaaacatcattagccagcagggagagaaatgcaaattaaaccaacaatgggccgggtgaggtggctcatgcctgtaatcccagcactttgggaggctgaggtgggcagatcattaggtctgaagatcgagaccatcctggctaacatggtgaaaccctgtctgtactaaaaatacaaaaaattagccgggcatggtggcgggtgcttgtagtcccagctacttgggaggctgaggcaggagaatggtgtgaaccctggaggcggagcttgcagtgagccgagatcgcgccactgcactccagcctgggcaacagagcgagactctatctcaaaaaaaaaaaaaaaaaagccaacaatgaatacattttttgtttgtgttctttttaagagatgtggtctcactatggtgcccagactggagtgcagtagctactcacaggcacattcatggcatactgtagcctcaaactcctgggctcaagtgatgctcccacttcatcctctcaagtatctgggactacagacatgcaccactgcacccagcttaaaacaatgagatagtacttcagaccactagaatggctatgataaaaatgatggacaataataaaggttggcgaggatgtagagaaattgggacatgcctacactgatggtgggaatgtaaaatggtgcagctgctttgaaaaactctggcaattcctcatgaagtcagacatacagttaccacatgaaccagcaattccattcataggtatatgatccccagaattgaaaatctatgttcatacaaaaacttgcacagaaatgttcatagcagctttattcataatagccaaaaagtagaaagaacccaaatgtccattaactgatgaatggataaacgaaacatggtatatccatacagtgaaatattagtcagccttaaaaagggatgaactactgatgcatgcaaaacacagatgaaccttgaaaacattttgttaaagaagccggacacaaagagtcacatattgtatgattccatttatgtgaaatgtctggaaaaggcatatccatagagacagaaagaagattagtggttgccaggggcttggagaagggggtaatgcagagtggttgctaatggttacagagtttctttttagagtgatgaaaatgttctggaatttgatagtggtgactgttggactactctgtggatgtatgaaaaaccactgaattgcagtttaagggtaaatattatagtgtgtgaattatatctcagttttaaaaatgggacggagttgtacctagacctctaatgtgcaagggacttcctcctatgtcctacctctatcacctggacatgtctaagtggccctcctgccatcaccttgacccctcttggtccctgtattagtcaggtttcttcagagaaacagaaccaataggatatcaacatcaatattggcgttgacaccagtatctatattgacaaaaatattgatatatggagagatatagacacatagaaagaccagctgttcacccaacaagctccttcctgtcccctttgggagctctattctttatactcccagtaactagctaggattccatgactagaatcatcacttctatttccttcttgttgtgaggttaatgaggggatacatattgagcccagaacctggccagtccagggactgtggatgtcctggtgagggtgactggcgacagctcctgagatgtagaaaatgagaatctatggttctttgaacagtgcctggctcctgagaccctaacctctatgcattgactagaatatgctcagctttcttaaagactagaattaaaaatctaataatattacaattctgctcaaaaccttcatcgactccccattgcattctaaataagagcctaagtttagtctaacattcccttttctagaatattatcccagtccacctgtctagtctcctgtgcaatattccctcagtagctgtcattcttctgcaggacacttgaccaaacattccagaaaacctggcgtctccatcatgcattgaacatgccatttggcacaatgccattgagaaactggacttgggatatagggagacctgctcaggaagtccagctctgccaaagactagctgggtaaccttgggaaagtcactctaccttctgtttagtttccttatttgtcaaaatgaggaatgagtctacctgtctcagtcggtggtcacaaggtttaagagacatagagcatgtgaagagccttagagaactaatttggcctagtctagcatccccttcctgcaggaagaggccccctctcctactccctccctctggttctgtgggtggccagtcattgccacttttacttctctggacacacaggtgaggaagtggatctctttgggaactttcaagttggaattaaagaaggatcgcctctttaggatggaagagcctggaagatgtgaagtaggggggcagtggtgcccatgtggcccagaaagccagtgtgtaagcatggagagagtccaggcggcatttaattttgggttctggttatttctgcagccagctgcagccccttccacgtaaagcaaattcactcatcaattacccttttacccaagctggattaagacaggcttctgatccttgcatgactgatgaactcaggagtgagggattgggggacccttcccagactcctcgttgctccaggtttgtgttcttattctccactcttacctttcccatgagatctgaggctctgtctaggcagggaattagtcatttgacttgctcctccctttgagtcagcttggggttcaatcagtgtttgggcttaacccctgaggctcaggcaacatcagcagggcagtgagagccgttgctcagggagtggaggtacttagaaaactttgagataggtgccaggacttctgccagcttccaagggagaactaagtttggacttctatgaatctcaatggctaaaccaccttcatttccactcagatgcactaaatccaaatttctggaatcaaggcctgagaatctgcatgtttttcaagcatccgggtgattctcatgtgacctaaacttgacaatctctgggctgagtcttttatgaagccccgagttcatcgttttacttcttcagattcctgagtacagcagtttggggaaagttataaccaaaacaagccagcgagctagtttcttatgctaatggtcacacagatctcataattacatggaggacacaagtgtctcataattagcgtctgctgttctgttcttggggggcaattgttctgcaacaatggccaggctcagtgctggaccaccagcctccctcagctcactcccctccaccacattccaatctcatgagagaagagcccctagttctcaggactttaaccctcttcctgccagcacccccaggccagtgctgaggtaggggaggttcgtgatctgatgccgggcatccagagggaagtgggagaaagaaatgtggaatgactgagtactgggggcagctagcactttgcatttaaggctgtgtttctcactcagacctaacgaagcataacttacagggttgaggcgcaggaaccccccttggtaattctgattttactaggatttgagactcactgaccaaatctttacctctttcaggctgacaagttgtctaaaagggcaggaggacttactcctgacatgcatctgccacccaaaccatcacaatagccttccgccttctcagtgggagtacgagtgaccctgcagcagaaggcagcaggaggtggtgacaagaatacacgtctggccctaaaacctgggtcagtcacatcctggctgccattcaccagctatatgattttaggaaagtggattcacctctgagctgcagattcctcatcaataaaatgaagacaagaacacccacccttagtatttgggtatttagactgtttccatgttttttttatttcttttatcatattcttggcattacgagtttagcattcaaggttctgaccaataagtgatcccaggggtgttcatgaaaatccccggggaaagcttttacaaaataaagaacggagtctattgagctggaatttgtaagggcatgactcaggaatggagtatttggagaaagttcttcaggtcttcctaatgcacacttttatcttttatttttaaatttttttattattcattattatttttttagagacagggcctcactctgttgcccaggctagagtgcaatggtgcaatcgcagctcactgcagctttgacctccagggctcaagtgatcctcctgtatcagcctcccaaatagctaggtctacaggcatgtgccaccatgccaaactaattttttaaacatttttttgtagagactgggtgatacggtttggccgtgtccctgcccaaatctcaacttgaattgtatctcccagaattcgtatgtgttgtgggagggacccaggaggaggtaattgaatcatgggggctggtcttacccctgctattctcatgatagtgagtaagtctcatgagatctgatgggtttatcaggggtttccacttctacttcttcctcgactttctcttgctgccactacatgagaagtgcctttagtctccctccatgattctgaggtctccccagccatgcggaaccgtaagtccaattaaacctctttttcttcccagtttcgggtatgtcttcatcagcagtgtgaaaatgaactaatacagtgggttttgctatgttgcccaggctggcctcaaactgtcctcaactcatcctcctgcctcggcctcccaaactgctgggattacagatgtgagccaccatgcctggcctcctaatgcatacttttattcaaactcatctgtgagaggcctggaaggactttgacatggtaaaaaaaaaaaaaaaagtgtgattttgcagaggcattgatttaaattgtgtacactgataatgttagagcaagtttgttagcagggagtgagcccaggcaagtacccagcatagacctgtctgtctcctttctaagatttccaaagggctaaacaagctttacttattatcttatttaatcctaaatttgtattgctgctctgggctactccccaggcccctagacccatatatccagctacctgcctgatctctccacttggatgggaataaacatctccagtgttgctggtcccaactgaaattctgattccccccaaacctgctccagtctcaacctcaatggcaacttacttaatgacaattaaattcttatgatttattgggcattttgaatatatccttaaatgttccctttctctcacaccctacatcctattcttaagcaaattccactgactctacccttgcaaaacatgcggaatccaaacagttctcatcatactcatggcaacctctctatcctaaggcactttcacctctctcctgaataattgccatcatattaaggcaatgtctctgatgctttttttttttctttttagagacgaagtcttgctctgtcgccaggctggagtacagtggcgtgatctcggctcactgcaacctctgcctcccgggttcaagcgattctcctgcctcagcctctcgagtagctgggactacaggcatgcgccatcatgcccagctaatttttgtatttttagtagagacggggtttcaccatgttggccaggatggtctcgatctcttgacctcgtgatccacccgcctcggcctcctaaagtgctgggattacaggcgtgagccaccgcgtacggcctttttattttattttaattaattttttgagacagtgtcttactctgtcgcccaggctggagtgcagtggtgcaatctcagctcactgcaacctccacctcctgggttcaagcaattcttccacctcagcctccggagtagctgggatacaggtgtgcgccaccatgcctggctaatttttgtatttttagtagagatggggtttcaccatgttggccaggctggtcttgaactcctgaccttaagtgatctgctcacgttggcctcccaaagtgctgggattacaggcttgaaccaccgtacccggcctagacaagaggcttttttatcccagtctcccaaatctctctgagctatgccatgccaactctgcaggaatccaggcaactctagtcagtgtggacctgaaaaggaactgaattctctgtggcttttttgctcattgtttccacttgagaggaatcctaaagagaaaagtggaagaatcgtttgcacaaagatatttatctctgggatgggtgcggtggctcacgcttgtaattggagcactttgggagaccaaggtgggcggatcacgaggtcaggagatcgagaccatcctggccaacatggtgaaaccccgtctctactaaaaatacaaaaattagctgggcgtgatggtgcttgcctgtaatcccagctactcgggaggctgaggcaggagaaatgcttgaaccaggaaatcggaggttgcaatgagccaagatcacaccactgcactccagctgacgacagagcgagactccatctcaaaaaaaaaaaaaaaaaaaaagatatttatctctgaattgctggtttattcagtagaatctttgagaattacaagtctgagctccagagcccaatgttaagaggtctgggagaagaggccgggtactgtggctcacacctgtaatcccaacactttgggaggcggaggcgggtggatcacctgaagtcaggagttcgagaccagcctggccaacatgaggaaacccctgtctctactaagaatacaacataaattagccgggcatggtggcgcatgcctgtaatcccaggctgaggcaggagaatcacttgaacctgggggttgggggcgcggaggttgcagtgagccaagattgtaccactgcattccagtctggatggcagagtgagactccatctcaaaacaaaaccaaacaaaacaagagatctgagagaagagaaagaaccagtaaaagacaccaaaaagaagtgacctgggaggtaggaggaaaacaggaacgtgtggtattctggaaggcaaataaaagcgtgcctggaggaagattcctagaaataagatcagtaacaggtctactagcagaaaaaaagcaatgaatctccactgaaggatatgaaataggacttcaataaaagaagacacatctttgataggaagttttagtatagtaaggatgtctgttcttcttagatgagtgtttaactcaatgtaattccagtaaaaacaccctactcaaactgataggaacttaacgaagttattataaatctgggacaattggtatacaagaatagaattgaatttcctgaaaagtaaacataagaagtggaacttgccctacttgtttaccaaaacatctaataaaggtaaattaatggaaaccaaaccacaggcgcatggagtgatgaataagggtgccgccgagtgcagacttgggctccagcatcacggctgttcagcggataatgaaattgacacttcacatttggggaggaaataatgaattacttattaaattttatttaaattagctagtcatttagattaaaaaaaaaaaaagctagaaactgtccctgagtcttattccaaaagagacttcagaaaaatggaagataaaaagaaaaaaaaaaatccatacagtataaaagagaacacaactgaatagtttagtaatctttagaaaaataaagaaaagattgaacgatttaattgcataaaataaaaaatttctatagagcaaaataaatcataaaactaaaagataaatactactgtgaaataaaaaaacttttaaacatatgagagaaatggttaatatcattaatgttaactctagggtgggagtaaagttgggagctaaataaatactttggtaaggagaggaagagccttaaactctgtccatcaactccttcctgcagatatcggctccctgcacccgcaccaggtcaggctacttccaggtgggcaggctgggccaggttcctaagtacctagagctgaaagccccacgtacaccactcctccatcctggtggcccacctggaccctcctgcccctcctctgcaccaggtgtgatgataggggacaggaggagtcacaggagacctcttctctcagaaagcaagaccaggctgacatccaagctaaaggcaggggctaggactgctgggtggagggatggagtgggttctgggtcaaaggataggtgggaggagatggaaggctgtgcgcagcagcagggaggggcggtgaggagggggaaaagcagagatgggagcccaagcagctagaatgggggcggcagtcaagggcaggagaggtgggacagctgaggtggggggtgtccctccaggccccagagctgccacttcgcctctcccagtcatccaatttgcaacgagttccctttagtacatggaaagtatcctccggaacttgtttgcaggaaacaacgcaatgcatgaaagcccactttgagatgttaattacctatttggttcatttattcaaaatttttttttatttactctgagtcacactgtgctaggcactgggaacagttggaatactcaccacacccattcatttataaattttaagacaatgtgaaaatgcttagatttaaaatggaaaaccataaatgacaaggtttctctgccaagtctactcaactgcctttcaccaaggtcagagaactccagggtgtgggtttcctcctaaatttactgaggctgccatgggccaggcagcacgctggtctctggggttagagtactgactatcctcatgcgtttattaatttaaaatgaggcccaaacacagggtcacacagtgtccaaaatgaaataacctttggaccgacacagcttgtttcaaaacagctgagatccgttgcctttttggcatttgatttttggtgctgggccaaaaaaaaaaaaaaaaaaaaaaaaaaaaaaacccaaaaaaacggggaggtgtatctaggaggggatcataaatgcagctatttaatctgctgtcactttgtaagagccccattgaatttttgatgggaaaaatgtttttgcccgggttgagcttcaggacaaagaagaaatgcaaggaacagagagcagaattgatagtgtttaaaaatatgttaaaagatcttatactttgtaacaaagttggtaagctacaatggaagaattcctgacacagcagaggcctggccaaacccctcccctgggggccccgggaataaaagcttcctcctccaagctgtcagttgaaagaaatcgtcctgcctgatggccatgtgccactctctcgatgcttgggaacaaaattgtgatgttgcagactatacattgtttttccagaataacacagaaatgtgttctggagaatcagtttagacttagggtatttggtgaaccagtacaggactgggaaacagatgccctgggttctagtcccggcttcacaggagtgaccctgcccaaggctcgctcactctctctcaacctgtttgctcctctgtaaaagagggataatgagctaaaggagctccatctcccaagactaagtgaggatcaaatatagcaatcagtgggtgagagagccactcatgcttttctcctccctccctatatacacatcgtctccatgttccagttagaatctcaggcaaggccaagaactgaattcagggtggctgctcatgtccttggccactggcacaaatgtgtgcctcgaggccccactttcctcttgtttctgtcacttcttatgtcagtgcacccaaaatctctgctggcctttccatggtgtaaaattgttttgaggaggcatctttccagtctagcactacatttcctcgcctgccttgcatctggggttagctatatgagaagttctcatcaagggaaggtgagcagaagtgatgtgtctcctctgggctggggtttatgtgaagcagggggatggtggagccagtgatagaggaagcctggatccctgaatcaccacatggaggaaagctgtcagcaaacaaggaactggacttttcagtgaactggagtcatcagtgagcaggaaacagacttctgagattaagccagtgaaattcggagcttacttgttgcagtagctaatgttacccagaagatacacactatccacacactcacctcccctggcacaagctgccctttcaaacctctcagacattcaccgatcacattcacacagatccagggaactggatcactgatgttatcaacttagtcattgattgaacaaatatttataactcatctgcaatgtgcaaggagcaaggctaagcatccccaacacagtgcagatcacacccctacccttcctggaggaagtcatgtccaggcctcctcccaagtctagctgctggcctgaggcctgaggccctcattctcctacctggggatccagcccacccttagacccctgatcctggactttcccttcttcaaacaccagcccctactcactgtggacaatacaccctagagcagtggtttccaacccctaggcccatggacctccaccggtctgtagcctgttaggaactgggccgcacagcaggaggtgaatggcaggcaagtgagaattaccacccgagctccacctcctatcagatcagcggcagtatcagattctcataggagcacgaaccctattgtgaactgctcatgtgagggatctgggttgcactctccttataagaatctaatgcctgatgatcagaggtggaacagttccattcctaaaccatccttctcccgtaccaccggtccgtgggaaaattgtcttccacaaaaccggtccctggtgcctaaaaggttggagaccactgccctagagactgtcttccccttaggactgtcactccccgtcattaatgtaaaaatccaactggaagtcctcaccattccaccctcagccctctcagctttcctccaactgcatcccttagagacctccaaaaccagaactccctccttttatcattatctgtcccccttctgccttcccttcactcttaatctaggatcgacctgagagctgagcattttcactgtgtcttcaagccctgtacagatggcagggtgcatgtccagccatccctggcagccccagaagctgctaatagttctccagggccttctcatttgtcctgattcttttgcatggcctcccttcagatgtagtgcctccttcccccataccacacacatattgcgtggagctgaggacaccactgtccacccctggaaatggaaacataagctactgacccctttgcaagctgaccttgctgcctctttaagtgaagggtttaactgtgtccacagggtttggccagcagaccataggctggatttcaacttcattcacttcctttacacagtacacaacctatacaactgtacatggtcgacttggctttgagctcctaaatctggctcttggggtcctccctctggcttgcccctccagctgtatccaggccctttctgccatgccctggattctccaccaatagacagcttcatggggagccctgtgtatagcaggctacttcaaaccaccctgtctttgctcttactgtgtcttctgactaaagaattctgctttgctcagccggctcctggtcatctctgagacctcgtttgggagtgtccccatcctggaagtctttctgcatcccttcttgcctcctgcagcctccactcccagcccctgtggcccctgggtaacccccattggcactccttgccctccactgccatttctgtccacacatctgtctgaacacagcctctctccagcagggatcacatctgtaaacttggtagcctgctccagttctggacctggcagcagaggacagcaggaaatggaactaaatgaggaaaatggttttaatctaaaagagtgcttgataggatgaaatgaatccattctgatagattcactcattcatgattcactgggtcaacaaatactttttgagcacacgctgtgtgccaggcactgtgttggccctggggcaccgtgaacaaccatttctggctatgtgggagctcccagcttcagctctcacatacatcatggtaccagaaagagaagtgtaaataatgattctgactggggcaatgtgagaggaaaggaaaatccgggcctaacctggcaggggctgtgggtggaagcccatgattctgggagtggaaggagggccacaggctgcagccaaggcctgggggctgttccccatccacctgtgaccttcaagagcctaggcctggaagttaagatcctggactcccaggcgcctctcttatgtgagcggctcagagagcttgagcaaggcactgccctgctttacattgcaactttgagggagaagaatccgtggctgaatgaagtttgagcccccaggtctgatgtcagtccatggggggcctgcccttggtataagccccttgctcttgggtacagaggccaccacagagccagagacagccaggaccactttgtgggccaggcccaggctgcttgctaaaatttgaagaaccatctgcttacccagtgctgctagagttgccattttaataaccaagtttaggagattcagttaagattgggagcctcatccctctcctagggaggcctcacaattggtgtttttctttgcaaaagcacgagtggggccctttgcaggggtttttgtacagcaagcagcacagagagaaaaagaaataaaaccaacaactttagttcaaagatgccagtaatagggggtttcttttccagtctccccatggaaggttgtcgacagtacaggcacaatcaggcccggcggctggcctgctcagagagagggacgtgtgctcctttgttaggacgggctgaataggatgtccctgcacccagacctggtctcccggctaacaaagggcccctttatcaccccgggcaaagagtgctgctgaggttgccacagcaactcagggacacagacttaacgtgcaagtgacatttcagatggtaaccgggcatgcaaaaattcaaatttctttttgtagagtggtttccttctctagatattttaaaggaaccatattgcaaacaaaagaaaaaaataagtaagccaacaatacacacgcggtcaagcagcaaacagaacactgcaattcagcatgctggctcctcccctcctgatgaaaaagttgggtgaaaagccttgctgagggcatcgtgggaggccctgggtgagctgagggtttttcttatctcaaaggcaatcggacaacattaaataaagtttggggaaaaaatcacctggaattccagtcactggacacaggacacttttccttgtctctgtctctgtgtttaccaaatactactggatgattcgctgcatgccaggctgagagctgggccggggcatgcaaacagatgtcaggttcctgctgtccaaggtggacggtagggtgcggtctcatgtaaatgtgatctccatccaacgctacattgcctttagttgaggtcaagggagtcgcccctcagaggaagaaatcgatgtggcatgagcagaggtgagcagggaatagtggaacttggatttgctgccaacccagtgttgaccctttgttgctattcgctggatgggatgagggagaccctgagggaaggaaggaagacaaggaggaagggctacctctacattcttctatagtggaaatcatggtaaatagcatgacgcagacacaaatgtttacccaactgccaccataacacacgaggtattttccctccacattttatgatgacagtttaataaacaatgtggaaaggctatgacagcaaacacctgtgtatccaccacctggattccaccattactttcctctcctgcttttatcacatacttactatccatctatctgtttctctatccattcatcaagctgccttcttttggaagtgcatttccagttgcagacatcctttcacttcccctaaactacatcagcatgtgtaccatcaattagagtctaatacttgtttacaatttttaaaatgtgaaatttacatacaatgcaatgtacaaaccttaaatgtacattttctgagttttgaggaatgtgactgcctgtgtaacctaagccttcatcgagatataggatattagggttacttcagaaagtttcctcatgttcctgccggtcaattcccccacttaccaaccattagagcaaaaataacgttcttgtgttgctttctagtcttcatggccattcattcttctgtttacttaatcaattcattctttagtcacccagggcctgtgtctcatgtgtctcaggcactggacacatgtcccgataggagatggtgtgtaaatgtaaatgctctgggtttgaatctcaggcctagtgttttgtagggcaagccatctaacctctttgagctccactttcctgacctgtaaactggggatggtaacattagcaacaacctcacagtgggtagattatgtgagatgatacatgccaaccacttagtacatagtaagtgctcagtaaacatattgtcttgagggaggccacagctgaatggttgttgtcagccctccaggactttaaaagcctttatttttctcatggccattaactcgactactgtctctgtctaattttggctattaaaagccctgcttctctgaacgtttttgggcaaggatatttaggcttctacagaacgatcgtccaaagcccagtagagacttggaagggagtgaccagagagtagtacatcttttatttttatgttcttgtcttcatgcgccccttaaagtgggcttgcttatgaagccaccagcggttggggaatggtcgttaccataaggggcattgccaaaggtcttcttcaaggtgagaagtagcagctgactctatctttattctccttcgtccacccctgtgctatagcagatgatagaaaatacagcagcagaggggcatgtaggaccaaagtggagtattgtcatccttagaagggggaaacattagtagacattctcttgtgaaaatgaaggagccagggtccgggcaggtcacccttgctcagagctgagccacttgaagatgagtccaaaagcaaggataagaaacagccatctgtttcacttgcctaactcttagccatcctacagtgcccagctcagcatcacccccctcaggaagtactcctctgtgttcccaatccactttgtacttaactctattatgtttatcatactatacttcattgaccacttacctgtctgtctccccaattcagctatgagcacaaatcatgtcgcaatcatagtttgagtctctagtccctggcatgtgctaaaaaatatttttcttatattaatttaaccaatattgccaaatgttttctaagtactaggtgctttatgtgtattatctttgtttgtttgcaaaaatgttaatttttcttcccagttactataaaaaatttggagaatatagaaaatagaaatatagaataaaaatgtagtttaatgacagacaaactttaagtatgattgattaagaaaataagagaaagagcatatgtaacagatacaagagcatttcaaaaatcataatactaaagacacgtttaacccaatacatttgaaaagctaagtgaaatgaacaatgttgtagaaaagcataccaacatttactaagaaaaaatgatatgatcatccaattataatttaagaagttgaatcggttattaaaattcttctttcccattcattaggctaaaccagtataaccttgacacataaagcttggcaacaatagcacagaattttagaccaattttggttattaacatagatgcaaaaaaaaaccctaagtgaaataacttcaaatggagtttagcagtgtattagaaaataaaatatggctggaggtagtggctcatggctgtaataccagtcacatgggaggctgaggcagaaggatcacttgagcccaggagttcgaggctgcagtgagctatgatcacaccactggactccagcctgggtgacagagtgagaccctgtttgtaataataataataaaattagaagcaaatagaagtcccaacaattacccaaggtattcaaggatggttcaatataaataatatctctatatataatacatataattaataggttagatgataaaacccagatggttatttcaatagatgccaaaaaaaaaccacattgtaaactacaattaattcatgccagaaaaaaatatcttagcagactaggaataaaaagaaactttattaattgataaaatgtattaccaaaagctacagtaagtatcttacttaatggcttaatggtgaaatataagaagtaggttcactgaagtaaggaacatgacaagaatgcctggtatcaccacttctatttaacattgattctagaggtgctggacaatgcaataagaaaagacaaagaaagaagtggtaagaagattgaaaaggaagaacagaatcaatcccccttccagacaacatgaccatctacacagaaagtcaaagggaatctatagaaaaacagagcaaataagagagtttaaaaatttttcttgaatacaatatcaactttgaaaactttaatagtttcctatctatctgaattaaaacaacttttaataaaaaatttaattctccccaagttaattgaacaattaaatgtaatttcaagtaaaatactaatagggttttctttttaccttaacctgaaatttgtatgacagatcagaaagatgcagtgaggtgtagtagttatgagtgtgaatttggaagccaaactggctagttgcacatcctggctacagcttgttctaatggcaggtaagttacttggcctctctgtgcctcagtttcctcaagtataagatagggactacctacctcatgggattgttggctaagggagttgagcagagtccaggacttgcattcagagtctttgacctctcatctggtattcttatatgcaagggccagagtaagtcactttgtgccaaagtctgtcacacacgtgttggtccattagatcttttgtccagcagacactttgagtacaaattgtgggcttctttggctcattgtcagaaataatggacaggttggcatgctgttggccagagggcaccatggcaagggctctaggaatgcccactgctgcctcagacaacagctacccaccaacaaagttcctggaggagatgtgtatagcttgtacctgcctgcctctctttgcttatgggctttctctggttgccacagccctgtggtgcctctcaggctgaactgccaggaatgaatgccccagacaggaggctttaaccaagagtgttaagagagtgggtgggtaaaaccccaattccttgttctttaaggggataactccaagtatgcgctctacgctgtttccagaattccccagtggagttaggctccagttgcccacagtaggaatttgttagataatatgccctttcttgactgtcttcctttcttgtctcactttcccacaccactatctgtgtgtcccggaactgcgctcccgtaaactacttgcaccagaatctgtgtctcaggatctgcttttgacctcaactaagataagttgagcttttgaagtgaggttttccctgtggacttccattttctgcacctcaatccagcttaacatatcccaccacaggcatgctggctactgggaaggaggggacagagatagatggtagacagggcctcactggagggctgaattgtgacttccctcactggcaaacatggcccatctgtgagctggaatctgaacaattaaattcttcacgtgtgtgtgtgtgtgtgtgtgtgtgtgtaggaaggtgtgtgtgtgtgtgtgtgtgtgtatgtatgtaggaaggtcttctccccagaggtgggcaggaagcatccaggctttgttagcccctgtgctagtcactggtggcactgagatgagcgagctattgtcctcgccttggagaaactcactgggcaaatgtgatgttgcagttctttgagattcacactagtagtcctgtgtgcagatggttattggagcagcaaattggagcactaagttggagtcttggagaagtcttaaccaaataaatgttacttgaattaggtcttaaaaaatgagtcgacatttgttaggatttttatggctcggagaataggattaaatattttctcaggcccttaaaacttccacctggaagtgacacacaccgattctgttcatgttccattagctaaagtgtcacatggtcacaccgaaattcaagtgggtgggggagtacaagtctaccacgtgcctataaggagaaagaggaagaagattcattactagatctaagtgctcccacagttgggtatttagttcctctgccatagttgttttttagggattagtccttttgatttaaagccaagacatttcctaggtaaaggagcaatagatggagtaggactcatttccctcttggatcccatgggtaagtggacacatcttgtattaaccatgtctttttttttttttttttttttttttttgagacggagtctcactctttcgcccaagctggactgcagtggcgctatcccggctcactgcaagctccgcctcttgggttcacgccattctcctgcctcagcctcccgagtagctgggactacaggcgcccaccaccacgcccggctaattttttgtatttttagtagagacggggtttcaccgtgttagccaggatggtctcgatctcctgacctcgtgatccgcccgcctcggcctcccaaagtgctgggattacaggcgtgagccaccgcgcccggcctaaccatgtcttattttctgtattctgatactttgacatctggggtcttgcagaccctggagggactgccccttctagagttagccaatacctagaaatagtcaacaactcacctgtgagcctgttagcataattttctaatgcaaaccaatacagagcctacgcctccaaccacctgtattattgggctctcacactccaactcactatctacctgctctaattactccagagccagtaccagacaactagggacagcccctatgccccagagctgctgaaattattcgaacaagccaatcctaaacctgctgacccggccttgtctgctccttcctgcggaagccacagtaaaggctcttgcccacagttctcccctctccctctgcctcctgactgacctggtgcttccccactggcccccaatggcatggtatgtcccctcctcctgacacctgggagtaccaaactgtcttttccatggcaatcatctcctggtgtgttgtccttaccatacctcaaggttaataaaacatattaaaacccatctatattctgatatctcagctatttatgatgtcagaaactgagaggtggaagatgaacaaacagatactctgggtctccagactggaccagctgggctactggctgagatctgagcttcctctctcacagatttttccttgcaatcaaagggaagagaggagaactgaagccccactaccatcttcaagacaacagatgaggctctggtgtttctttgggggaactgagtcatcagcttcctgtctgatcaactgccaacatgaagtggcaagatcaagctttggggccttgttggactttgctgctggacttctcagatacctccgtggtgctggctccctcctcagggaagaaagtggatatacgtgattggcagggttgattgttgctgctgctggcaggctccagagaagtcaaatagctgcctgtagctgacccattgcacatgcatcttcaaactctggtggtcattgttctacacctctggccagagttagtgggaccaacactgtggaaatatgggcagtaggaagtgctccaggtggaatttccagacttaggtgtagtcctggctctactattaactgtcaggatgtgcattcctcactgggtctcactcttctcatctgtaaaatggccacagcagtcttatttcctgacccagagtatttctgtgaagactgatttcttcaacctgcaacagaggtgtctgcaaaaaaaaactggatcacaaggtcaggagatcaagaccatcctggccaacatggtaaaaccctgtctctactaaaaatacaaaaattagctgggcatggtggcacacacccgtaatcccagctactcaggaggctgaggcaggagaatcgcttgaaccagggagtcggagtttgcagtgagccaagatcacaccactgcactccagcctggtgacagagtgagactctgtctcaaaaaacaaacaaacaaacaaaaacaccaaagcaaaatgaaacaaaaataaaactacagcaagcattataactaatggtgaactattgatatctttccttctgagatcaggaaatcaggaatggggcaagagtgtctgctactattacttctttccaaaattatactggtgatattagccagtgcaacaaggcaagaaaaagaaacaaaacttataagaattgaaaagaaaaaactaaaactctcatttttacagatgagatagaaatttttttttaaagccaaagaatctacagatgaattactagaattaataaatgagtttggcaatgttgctggatacaagggcattatttaaaaatctatttatactatgtttcagacctatattgctaagtaacaaatcactccaaaactttgtggcttaaaataacaataatcatttattatctctcatggtttctgtgcattttggattcaagaagggctcatctgcacagttcagcctttttcatgtgggtacagtcagatagcagatggaacaggaacagcaggagctggcagagctggggactggctaggaatccctctttacttagtatcagggtctctgcatatgatttttctgtgtgggttagtttgggcttcttcaatgcatggcagcctaagagagagttctcatatgatggcttagtgttccaaagacaaaagtcctgagagagggagccaggtagaagccctattaattttatgatctagctagcctcagaagtcacatagattcacttctgtcacattctttttgttaaaacccattcgctaagactaatcccttcccgaggggaagagtgttagactctacttcttgggaaaggtgtcaaagaatttgtggacatgttgtaaaacaacaaccctgtactgacaacaaacagaaaataaaataaagaagccattcataatagcaacaaaaaacacccggggctaaatttaataaaagatgtgcaaggtctccacgtagaaaactacaaaacattgctgagataacttttttaaaaacccaaaataaatgaagggacataccatgttcatggataagaagttttactattgaaaatgttaattttattccaattgatctaaaggttcaaagtgataccaattgaaatcccagcaagattgtgttagtgtgtttgtgtgtatatatataaataggtatgctgattccaaaatttctgtgaaagtgtaaacatcaagaatagccaatgcagtcttaaaagaacaaaatgggtaggcttatttcatgggacatttagacttataagcccacagtaatccagacattgtgataatggcacagggagagaaaaataggctaacagaacagaatagagaattcaggaacagtcttatgcacatatcgactacttgatttacgacaatgttagcattgcagaagagtatgtgtgtgtgtgtaggggggtggtggtggtggtggtgatcttttcaataaagagtgctggtcagttggatatccagatgaaaaaaatggacacaggacaatggaaatttttttctgatgaggtgtggcattgtatttctagaaacaatgactgctgaaatttatttggaagttctttcctttctgagctataatttccctctgttgttcccaagccttcagtgaatgcctgtttcccacacctatcttttgttaatgcatctttcttatggtcctagttctaggccaggaccagcaaagcccaagcagcagttgagaactaagttctaagctagctcctgagtgggcaggaagctcaagtccttttctcccaatggcatcctatatcctggtgccacacaagaatgccattctggctgacttcgcctcctggcctctcccagtcagacatacctggagcagtcagtgagcagtgagattgctaggggagattgctagtgtagacaattcttgcatgaaaagggggatgggggtgcaacagtctagcaaccagcaagtgatatcaagaactagagggttttttttttttttttggttggggaggaaccccatttcacagtcacctttctgacccaccatcagagccatcccattccaatctcattttcttcctttcctcactccaagagaccgtgactgtgggcagatcctagacccctcttcagagcttcgggctctaggcattcctgcggccctcccctccctatcattaaaaggggtggggtcctgctgccttctccaagtggtttcagctctggatcctttgggggcaacggagcccacccgcctggagctccattactgatgctgcaagtttttgactcagtttccccatatgtgagtgagagtttaagcgcggcaatctccagggggggctgtcaagctgactcagatcagtgagacgaggagggggcgggcatgctaagagcatcctccggcgctggcctgcgtccccccaggtaaggcagcacccatctccaaagtggtcctgtcaccaccttcctcttccccccgcacccacgccgcggggcggggactagcgccgcctcaaatatttagggcaagggagtgtcccacttctggggaggggtgccgttcgggcttctctcctcaccgtgggtggcgaaaggcgggacggaaaagcgccgtctggacaggcgcgcccccctcagggatgcagggccgggcgggggacccggcggcggcccagcccggaggaaggacctccacgccccggcccgggcccccgggcccccggccctaggcagcgcccgaggccggaacaatagcgcgcgcgggcggggcgggggcgggggcggggcgctcctctgggcaccgcccccggcccgccccccgcgctcgcagtcccgctcgcacactggctcccacccgccgcccgcccaggcactgcccgcgggagccgccgccgccgccgccgcgcccgccatggacgtccgcctgtacccctcggcgcccgcggtgggcgcgcggcccggggccgagccggccggcctggcgcacctggactattaccacggcggcaaggtaggcgggggcgggcgggggtccccggcgggcggggccggagtcacctggcagctcgggactcaggcgctcccggggtcacacggggccgcgcacatcagccccgccgacgggcacgggcggctcacatcgatcccctcgcggccacgctcacgccctgagttgttgggatcgcgggcagaagtcatcccgacagccacccgtgcgacgacacagtggcccctcactcgcgtccccctgacagcctcgcagtcattcacaagccgtcacagtgacccacagccacacgcaggcggccaggcactgcttacacggtcccgccgtcccacgcaagtcaccctgacagtcacttatacacaacgacacgcaaccactcacccgcaaacagcctcaccgccacagacgagtcacccacagacgctccgatgccccacacaccgtgacatgcccccacccgctgtcacacccaggcacaacgggggacagtcacacaaagaagtcgcccgacagtcacactctcgcagccacaacgcctcacccaggcgcacgctgtcacacacagccacccccctggacggtgagcctcagacacagatcgtcctgacggccacacagtcacacgcggtcacacccagggacggccacacctcggtcatccacactcgcgcgtcgaggtttaacttctcagcgccgcagcacactaattgggcagtttactaattggccgtcactgcctggcggggcctcggattccgagtaggctgcggccaatcgaggcctgtgtcctcccgggagcggtgagccggcgtccctccaggctggggctgtagtgccggacaccctccctcctccatgtttccaggatctatccccccaccccagccaggtcccagctgcgctgcgccgggcgcattcccagtgatggaggcttgcgtgcctggaaccccgaacccgaggcgtcaggtcccactgccgggtctggcccagcctggatgggttgggtgcctctaagcagtccgcgtccccttcggtcgccggagagggaactttcaaacttagttaggaagccagactgtccgcgcgtccgccagtcggtgcgtcggtcccgggccggctggagccaagcgcgggttttcgtcactcggagcccggattgaacagcgcgcgtgggtttcccgcagccctggcgcagacgcgtgggctccgtggcgatgcggggtgagtgcgcgtccagtggctggatcggcgccccccagggtctctccccaacctcgcaggcttttcgtcaggcccctggtagtggggatgaggcaggagagaggcgtcccggcgcggatcccggggcctcccgggctgggcctccctgagtgcgccctcaggccccaggggagcggcttctggcaaagcctccctgcagttcgccaggggcagcaagcatccaggccactagggcctgcgcgatgtggggcggtggtgggcgacaagtgaggtctcgcgaagagtggcggtggttctcttttgtccagtgacctgcaaagttagaagccgatgaggggggatggtagcctcaggagaaggccgggagctgcctccagtctgatggaggaaaatagattaaaagtagcaagtggagttttcagggaggagaaggttgggtgtgggggcagctggtctgtcttctgcccttggctttgttatttttcaaaatgtgaagttggcgaggtaggtaccagcctctggtttgcgggtgtgggtgggctgggcatttgtgcctcaaagtctgagtgggtgggggtttagcctggagcgctccgtttgagggtggtgtttctataaatctcgccagggtggggctgtcccaaataggggcctttggaggcaggactcagccgaggcccctgctttattctgatgctctgtaaacctctgactcagcaccagaacctgtgcgaatctcgccgggaagggcccgtcagggagggaatgagaagccggcgattctggtttctttctgtgtgggatgtaggacccctggcccatagctgaggatgtgtccagagtggggcggggcagggatgggggtggggatgcagctgagccacttgataggtgaaaggaaggtctgactttgcacttggatgtgaaatctgctactcagtccttcaggctagagcagggtgaggcgggaggggagaggtcactgtattcatttaggggctagaggtcttttggtaagggattcccaagtgggcatggccttagtggtggtggttggggggtagggccaggctgtgatcaggaactccccttttctggctcaagaagtggatggggaggggttggggagggaaatgcccaagctccacctttacactagtcactatcaaagctggaggggaaacaggctcagggtgcagtagtgaccacacttggggcctgtaggcctggctgaatccagacattgtggggtggacacacccacacatggggggctctgtccgcagacaagaggctcgttgcacagggagccaggctttatatacataagggcaagcatttgcccaagtgatgcccgacacctatggggcagttgacctggaagggctcttggcgaccgtccccttggcgaccatccccttggcgactgtccccttagcgatcctctacacagagattcccagcctctttaaaccaaagtcacgaacattggttgttcttttggtatcttttgtttgagaaaatgcacactaatgaaaagctgttatggttttatttttgctttgaaatagatgtgtattttattaaacacaatattagcatgcattagaaaaatagcttaacaggtatgaagaagactcattactatttaatgtaataaaggtgctttttgagcatagggatttgtggccccatggctcccaggatctgtggctccatgctgggaaccattggtctcctccttctttgcattacagaaggggaaactgagtcacagaggagtgtaactcacagattacacagcaagtaaggaacaaagatgaggcctgagcccaggtttgactcccagcaggacacttgtttggcttttttgcaagtctctgtcatggttcaggggtttagagcctgtaacatctttcttagggtaactatgaactcctggttcagattttggcaaggcatcttaccaggctgggggacagctgggggatccctgctcaactatggcagactagtgtaaactagccatcagaactgggcaagcctgggttcaaatgtccatttgttgcttagtgacctagggcaaatgatttttagctcattttttactgagatgtgatttacatacaataacatgaagattttaagtgtacagttccatgagttttgataaatattaacactcatgtaaccagcatcccagtccagatagagaacatttccgtcatcccaggaagttccctcacatccctttatagacagcacgccttatccccacctccagaggcaactacttacctgatttctgttaccaatgctttctttaagttcaatttaggtatattaaccatgcttaagttctagaacttgatatgcagcataaacatttgtgtgtctgtcttctttttgctcaatgtaatgtcttcaacattcatccacgatgttgtatatatccatagtttgttccatttaattgctgagtaatattatattgtataaatataatacaattggtttatccattcacctgcaggtggacatttgggtttgtttccaagttggagctattataagtaaagctactgtgaacattcttatacaagtctttttgtgggcggggaaaatcatttaatatctctgagtcttggtgttctctcaaagacaacattgcctacctctgagtttcaggacggttaagtgaggtgatacaggttaggacagttattggcacataccagctactaattagataacaacaatatcaaccatctggggcccattccaggaagaggcttagcatctccgttccagcatccttcgtccctggactgaagggatgaaggccttcatcaaggccaacctgggtaccaccttccccatgtggtgcttcacagccagcaaacttctctttctttccaggcttccccaagaactgatactgcataggatgtggcatgttctgccatccatcattctaccaaaaatatttattgagcacttcttggtgctaggcactgtgcacagcaactgatgctgcagcagtgaacaaaagtcactcaaatcactgccctctggagcttatttatcagtgtgggaagtcataaatatatgggtgaaatatatggtatcatgattgatgggaatatgacttttggagaaaaatggaacaggaaagagagttgggagtcccaaggcctggggctggtttgtgattgttaaatagggaagttgaggaaggccttgtggtctagaatagtgtttctcaaatctatgtacacatgaagaatcagctggcaagattttttttaaattttattttaagttccaggatacatgtgcaggatgtgtatatttgttacataggtaaacgtctgccatggtggtttgctacacctatgaacccatcacctaggagttaagccccgcatgcattagctatttatcctgatgctctcactccctccctccccccggcacttgacaggccccggtgtgtgttgttcccctccctgtgtccatgtgttctcattgttcagctcccacttataagtgagaacatgcggtgtttggttttctgttcctatgttaatttgctgaggataatggcttccagctccatccatgccactgcaaaggacatgatcttgttcctttttatggctgcatagtattccatggtgtatgtgtaccacattctctttatccaggttaacactgatggacatttgggttgattccgtgtcttttgtctggcgagattgtaaaaacagattcttgggctccacccccagagattggattcagttggtctggcatggggtcctaggaatttgcatgtctaatgagctacccaggtgttgttactgctgatccaaggaccacactttgtgtagcagttgtttggttgtttgtgtacaggcttttgtgggctcctggcaggcaggaattctgcccagcacctggcatcgtgcctgactcataattgctcagtaaatatgtgctggtgggtgaaggattcaacttcccacccacacagctctgggcacagcatcttgtaaggatgagatctggacaagcttggttaatgaatgattgaggactctttttgacaaaaattcatgaagtggggttaaactatggacttgatctggacttgacctatgtgaggcctgcccggcatacttggtgggtgagattcccacagctcctttcttcaggggcacaggtggctgctaatgggtcccatggaaggtaccctgggatgggtgggcttagagctgagatggctggtcccagggaacgctagatggatgtctgcatctctgctaggaagctctcatttactttccatctaaacatgctccctatagctcctcccccaacctgtgctggaggctcctccaggaaggaccccaggatgtttgcatggcaggaccagcagcccaagcctggcactgctgcccccgatctgctgggtgaccttgagcctgtcagcacccttctttgggcctctgtttccctgtgtgcaaagggaaggcaaaccggtgaccatcagcctagagggatggtgtgggggtggaaatataatgaaataaaggctgggaatgtcatttctaactgtggagggtgcactgggagggaatgctggtgggaatggtgctttttgaggagatgggcctgctatccttcagaggacaggaaccactgtgtctgcctttacttttgtattcccagcgctagcctgacacatagatgctcagcaaatatttgctgaatgaatgaatgaatctagggcttggcagttgtaacctgtggcttgaggaacttagcatctgtttggctgttgtcatctgaagactttgtggggcacaaggagccagggcaggaccccgcagaggcacagagtctttggcggaccttccattcctagaggagcttccccaagtgggctcggaggacagagcctggcacacagagcagcctgtaggcgggaagaggagctgagcctgcatgaaggacaaggtcctgtgcctcccccttggtccagcagtccccctgctgtgtggctccttgccccatgtgattctgtagggcaatctattttgcttctctgatttcctagagttggtctcaggatatgaaggcatcatggattctggaacctggcagacttgggtttgaacactgccttcaccaccatcagggcaggcaagttatttaacctccctggactcagtctcctcatctgtaaaatggggacattgacatctcccctttggagcttgagggttggagaccatgtatgtgtagcacttggccccagcaggaaatgctttcattttcatccacaaagagcagcccaactgaaagttaaaatgcgagaggaacttgcttttctgtaccagctgctggaggatgctccacagctgccccgccatgttcttcttcttcttctttttttttttctagagacacagtcttgctctcttgcccaggatggagtgcagtggtacaatcatagctcagtgtagcctcaaactcctgggctcaaatgatccttctgctttggcctctcgaagcgctgggactgcaggcatgagccaccacttctggccctgggctgctggcagtcccaacgctggatgcttccatgtcttgatccctagacctgattttcctgagcctctgggttgaaggagcctcttattggagtgtccaggattatgaattgggagagagttgctcatttcctccaccttctgttaccttcttgaatctgtgcagcagagaaagtgggttttggaggcagagaaattggttcaaatcacagctgcccagtccactggcttgggcaggtgacctcatgcacatcacttagatgttcaggtctcagttttcttatctgtacaaggggacagaaatgcctgccttctattgttgctgcaaagatcagattaaagtaataggtatggaaattctgtctaatctagaatgatgtttcccagcctcggcgctattgacattttggacctaataacattgttgtgggagttgctgcatgcattgcggaatgtttagtcctatccctggcccctacctagtagatgccaagagcatcaccctgcccccagtcgtgacaacaaaaatgtctccagactttgcccctggttgagaaccagtgatgtgggaagaaagtttagcgcaggtaaactagaagatggtggtgaagcgaattgcagcaccacagcaggcaccgtgctttctggccagggcttcagtccactgtctcccttcagtaatcctgtatccacagggttgacagtcatcttatttacatggattcaaacctacaggatgatttttcagcatggtttgggagcaacagtaaaaacatatggtaagtgattattaacctaatgagttgtggtaaattgtaattttatatcttaatgaaatgatgttgtatgacacaggataatacattttgatcaatttccctgatatttaaaacttgctgccgtacagttgctaattctggtgcctgccaggatgagcaacctgattgtggtttttcaatatttaatggcctgtttactgctgggtttctcagatgttcaacaggtttttattgagtgcctactgggtgctggggattcagccctgtcctggaggctcagtaactccagaggaaagttttatttactgggtgaatggctatgtggatttgtaatcaattggcttaaaatgcagagtaataattaaatataaaattggctgagcagtgccaatgccgggagtgtgggaaggtttcacaatggcagtcttacaggaatgccaggtgggctgcctgggggcatgtagagtggtggggggtgttccaggcagagggagcagccattgtaggggtgctttggggatactgtcagcctaaggaggggaaacctgcctgcgtgggagttgggacaccagcagagatggttatgaagagccttgcaccccagcctgtggggctttaagtagaggactgtgcctggaaccaggggtacggtgcacaagtatggaatgcatcacattgctggattctgaccatcctcaacgactgtctcttggtcttctgctgatgggaaagtctaatgacttgcatttgatttcccccagtagcccatgatagatactctgcttctcaaactttagcccaccagaatcacctggagcacagttaaaacagactgctgtgttccactcccagaagttctgactcagcaggcctggggaggagctgaaagttagcactactagcaagtcgatggtgctgatggtgccagtctgggatccacacttagagaacctctggtctagactagaacgtggcaggattgtcctgccttaactgaggacagtagagatgtattgctggcctggggcatggagccccggtgtggacatggttaggtgtccttctcaagccccttggtgggttgtggggagagtcttcttcaccatggggaaagtctcacattgggttgcctggaaaaggactctgagatggagagttgctcgtggaaggtttatgtggggaagttctctgcggtgaggtgggcggaaggggtgcacctgcaggggacacaggaggaaacgtgcttgggccggggagaagctggcctggcctgacctgtggttctgaagaacgccatcccacagggagctgtggcgctaaggtggctctttagtgttgccccagatggaggtgaggggactgcccaagcctttgatttctgcatcatctggtcatttcagcataagtgagaggcctaaaaatgaacagcaggcagttcccttgggtgaaggagttcactgcagtagagggcagtcccattgaagggcgagctgcaagcccagccgctgatattcctgaggttgggggatgagcatatggaagagggctggagagtaccactgtgaccatctcagggagatttcccaggaaatcaagggccagcatgtggatgacttttagtgatggtcactcacttgctcaaggttcttctttgtctcatgaagtgagagagatgtgtcatctgctctgcgtaggaaaggcaggatagttactttttgggtccaagggaagacaaatggtaattaatggagtttttaggggctcaaagatgctcttagatgctccagggtgggattccagagtccttgcactgagctgtcacatatcttcctgtgtgttagggaggactccagatgggtctccaaggagcttctgggccatgcttaaggaggtcacctctgggcaagagccagggctttctctttgggctggagtcctgtctagttcaacaagaggccatctgccctgcccagcctcaatgcaggtcagtgtttctggctttgcctttcaccatcactgagctcccaggaagctcagaggcaaaggaggggtcacctgtagccataacataggctgctgtggtgtggctactgttcattaactcactcccaactgcacctcatttttctaccattttcctctttatcttgagtcctgccactgttttattttttaaaaattgattttgctctttgtaagacacacagaagtattttagaagaggaaagacacaagtgaagtccctctcactctctgtccctctcccttctccacacacagccctgtgtcccggggtgtccactgaaaagggagtggagggtgtacttcccatcaaaccctttcttcagttccttacttttaatacattcgttgtttttatttctggaatcatttttttattttcccagaattctgagtttcttgattgatctcatatcatcgtggtctattcttcttttatggatatgtgactatcttgaatctctttgaagatggtaattcgatttttaaaaaagtggtcttttgtttcctgcatttaactctgttttattggtgattcttctgttcacttttaggcctctcttttatgctgatattttctacaaatgcctggtgattctcggttgacatttaaatttgtaaatgggaggggggcatctagatctgttctgtggttgtgagtttcctcaacatgggtgaaagccgtgactgcgtgggtgggcagggtggatgttgagtagaaacgctctgtgtgtggtgtgtgagtgcagactctattgcggtgtgggatgagcctacgaagtccttgggggcctctttgtccctcgggtaggccagcagttacccccagggcgctggtgcactttttccagccttgtgctcacccgcaggagggagtctcccaggcagatttctcatttcaattagagaattcttctggttggcattagcctgggggcaaaaccaacaaacagcttctcccagggctttggacgggcacaggggtcccagcgcaggcttcctctctctgggaatgttctggggttcagttaggtgttgggtgccggttccttagtgctcacaggcttcgctgtcagtctgtttctttgacttcttagtttctagcagtctcataacgtttctgatcccagccttttcctattttcttatgtgccttaagttttcctaagaactatgctgggcacatttgtccccatttttttaggtgagaagactgaggtccagatgaatcaagtaacagaagggtggcagagggggctgttaggcagagctggaatttggcccgagcttgctctgcagctgtcagggtgccagggggagctcacttcctcctgctgcaggggtggaagagtgtatcactggctccttgtcctagagtgctttttacattacagctaattaaaatgtgcttatttcgaagctgggcctgatttgcaggaatgatttagaaacttgtcggaaatgaatcgactcagtagtagtataacccagggtcaatgccacgcatatattttattgtttcatcatgctgtgttttggcttgaactgaactttatgatgtggaagatggaccctgggccctttatgtctcatttattctgcaaatatttcctgtttacattatttaggaaggtctcccacccccactcccatgctttctctgttctctatgtccacctgagatggaagttcatttttatgcaaatccagatgttggatccaaatgtgactttgagtttgatggaagtgcctgggttcgtatcctgacacttataagctgtatgactttggacctgtcacttagcctctctgagtcgtggtttcctcacataatcacaattgcatctcaggttggtggttaggtctgtgggagagcaagtaagtcttcccctccctcatttcttcctccaggcactgtttaggtgaaccgagccctctgtagaacagcgagcatagaccctatactaggttttagtgcctttatacactgtacagtctaaggagcttttcagttcaggatcggtgtagcgcttgttcccattggggctgtctcttttctctcctgtatcagttcccttctttctcattgcaattcccacagggagtttttaaggaccaatgaaacattcagactcacaagatgaacacaggggacacttggcaccagtctcctcgaaagatttgggacacagcctgacacagcctgccagcaaggcacgtgagctgttctcttctgcacaagtaattcttgcaacagtctccgcagtggtccacgaaggtggccaggagctattctctttgctgccccctccctcccaggatctagttcaagtgcaaaggaatgagatacacaatgggtggctgtggaagccaccctggcttagaagccttattgtcccagctgccatatccattgtaacaattccgtaggcttagcttcaaggacccagggacatgtcaggtacaaatttctctgcatctaggaaaacccaaattatggcttctttttcagatatttataacttatttatagttcctcccagttcaaatgcaacttaccaatcaggggtcatttttaccataagcagagttgcctggtaacatagttaacgtcccactttcctcaggtttccaggggagttatgctccgcaattaacaaaggtgaaattctcttgcaacaaggaaaagggtttggttaaccctttcccccatattcatcatcctacttttttcccctgtgggctggtatttttggcatctcttttggaaggacgaatggagtcctcagaaatatattccacactgtgtacattttctgatgatctatataacacacacacacacacacacacacacacacacacacacacacacacacacacatcatgagatatgctttggagtcatactggcctgggatcaaatcttggctcttggctttgccacctatgaagagttaatttccttccttccttccttccttccttccttccttcctccttccttccttcctccccttcccttcccttccccttccttccttcctttcttccttccttcccttccccttccttcctttcttccttccttccttctttccttccatccttccttccttccctccttccttccctccctccctccctctttccctccctccctccctctatccctccttcatacagccatccaaggagcatgcactgcctgctgtatgcaaggctttgtggtaggtgccaggcaggaacaggtaattaagacatggtccttttccttgagaagcatgatcttattagagagacagaaataaacaatttcaaatgtgtgtggtaagcattatgttgaagtagcacaggggagtgtgggaccaccaggctaggctggggacagtcagaaaaggcttctcagaggaagggacacttgcctgtgcttgaaggtgagtagaacttggccaagtgaagaaggtagggaaaagcattccaggtagaaggaacaacatatgcaaaggcatagaaggtgctgagagtgtcaagatgtgaggctgaagaagggagccaggggcatttggaaagctgtttattatctctgacttcagttttctcgtatacaaaatgtgatgagcaatgcttacttgtttatgaaattaaatgaggtaatgatgtatgtttaagcacctggtgtagttagcttcaattccctttccaaatctgtctacagatgcctaagagccaggctttgattttaaatgagagaaggaataaaaagcactgaagggcctggccgcccacttgcacagtgcaggtttcctgcagctgctcttgtgttggtcgctttattgctgctttggacggagcactaaatgtctgcatgccgacctggattacgtccttcaggatcagcgaagcacatcattgtgttttcttaatggctcaatgctaacagcaagtcacggcctgtcgaggtgtcctgtgggacaatttttcatctgcctatggccatgcttctgtctgacgctctgtcaacacgccctgtcattcgcttctttgtcttgctttgccttccacatgccagctggggaaacttcgctttccatggagtttggagacatttactatccagtgaccaaaggtcaggatgagctgaggagccatggtggccaccatcaatgtctttatgatgcgtaaattggatcctgtctcttctccatacaaagctactcagtggggccgggcgtggtggctcacgcctgtaatcccagcactttgggaggcagaggcgggtggatcattcgaggtcaggagttcaagaccagcctggccaacatggtgaaaccctgtctctactaaaaatatgaaaaaaaaaaaaaaaaaacaacaacaaaaaaactgggcatggtggctcgtgcctgtaatctcaactacttgggaggctgaggcagaagaatcacttgaaccctggaggcagaggttgcagtgagctgagatcattccactgcactccaatctggcgacagagtgagaccctgtctcaaaaacaaacaaacaaacaaacaaacaaaaacagggaaaaaaacccccacaaagctgctcaatggctttctgttgtagcttgatgaactcttacaaacctaaatcacatcttcttaggtttctgcttaaagccttccagtgctttgccctggtgagtagataacatccaactcctttggcccataagtcctcacgtgagcttgcctctgcctgcatttccagcctctgttccaggaaccaggcttcatgctggggacatggtgatgagcaaagtcagagtcagtccccctcagtgactccattccagtcacctggccttcttgctatttctcagatccccccaccctgttcttttgcgcttgaggggctttgcacatgctgttccctttgcctggaatgttcttgccctcattctttacatggctggctcctgcccagcctctgacctcagcttcatcctcgtcttcccagagtctgacctgctcatctgtgcagttgtctttctttttgtctaccatagcctctgagtatttttattttttaattttttatttgtttctttatttttttgagatggagtctcgctctgttgcccaggttggagtgcagtggtgcgatctcagctcactgcaaccttcacctcccaggttcaagtgattctcctacctcagcctcccgagtagctgggattacaggaacacaccaccatgcccggctactttttgtatttttagtagagacggggtttcaccatgttggccaggatggtctcaatctcctgacatcatgatccacccgcctcggcctcccgaagcgctgggattacagacgtgagccaatgcgcccagctgcttctgagtatttttcttcgtggcatcatatatctgtgaaattacttggttgctcccccttcaggataataaactttaagaagcaataggctcatgcttattttgtttaccattgcatccccatggtgtctgacctatagtaggtgctcagtaaaaagttgttgaaagattgaatgaatgaatgaggcaggttatatttttcagagatgaccaccgtaacatagcccaggctgtgtttctaagaataatccactcaccctctctgggcctcacttaccctgtttatatgttgttgccaggaggattaaacacatatatgtgagggacacagtgtttggggcctgcaagtgttaatccatgtgaattctataattctccttgtagaaacatgccaggcccatctctagctgagtccaaggaggaaagttgagatatgactcaagagggatgatgtttgaaatccttgtcctcatggcttttaatcaatgcttgaccctttggggcaaggctggcagatgcagcccctgttttgtccccttcccatctccctgggaatgatgaccttgcctttgtcaggagggaggcgtcactcccagttgcttgggctggggtatctggggcacagttggcctggccttcggagataataaaatctctctccagcccatgggaatgtttctgttgagcaagcaggactttttggtggcttctctcctgaagttatcactcttcttttttaaaaaaattaaactgtaaattatgaacactatgttacctgccaaaaagtttaggaaatgagggaaatcacctgctatgatcccacggtgcagattcaagggcagtgtttgacactttgccttcttaatactcaaggcttgcaaactgcactgccctaccatggttttctggaagccccttacccatcgctttctttctacctattcctgatgtttattgtttatgtccttctctcctccctcctctatccccttcactagaatgtcggctttggaagtgtggggaatctctgtcgtttgctcatgggtggagccttcagagcgactctgactgccaggcctctggttttagtgtttcccacccaccaggcaaactcctacacatacatcttttatgttttttttctttaaaagacagaggcttgctctattgcccaggctggagtgtagtggtacaaacatggcttactgcagcctcgacctcctgggctcaagcgatcctcctgcctcagcctcctgagtagctgcgacttcaggcacaggccaccacacctgataatttttaaattttttgacaaggggtctcaccatgttgcccaggctggtctccaactcctgggctcaagcgatcctcccacctcggcctcccaagtagctgggactacaggcatgtgccaccacgcctcgctaaacatacacgtctgttaaatttctgctcaagcgccaccccctcctggaggctttcactgctatcctcccctgtgctcctgcccttcccatctggcatctctgacactgtgggctccctggggctgggctgcccaatgtccataggagacatgggcttcagaggccatgtctgggtgcttggacgttgacttaagagcagtgggagtcctggaggtgtgctgcgttttagaagaatctttgcagttgttctgtgggggaaaatactggacggggcaagagtggaggcaggagaatagttgggaggtggtgcctgtggctcaggggagaattgatgatggcttgtggccatgctatccagtaaggtagccagtagccgtgtgtggctcttttcattgaaaatacaggaaaataaaacaaaatttagttcattcacactagccatatttcgagtactcgctagccacatgtgggtattttagcccctattgggcagcgcagatacagacatttccatccctgcagaaagttctgttggtccactctggcttggactgtggtggtggagtggaaatgaagagaagtaagggcgtgggaggtaacaggagggaagatgtatgcagtttggggatgagttggatctggggtatggtggagagtggggtatcaaagaagactcaggaagtaaaatttctgggtcaaaaaagagtgagcatttttatggctcctgatttctgctgacctgtcattttccaaaagggtcatcaccactcaccagaagcatgagaaagtgcccattttatcctgccctcctggcacagcttattaccttcggaacacccttccattgtgtatatctcttgccaaatctgccttcatttagggtctagcatgtggaccctgaggtctttgtgatctcagggacttatatgtatattaatgcagatttcaataaaaagagttatgtttgccattgtggtacggtctgatgctgtttaaatgccttcggtaatatcttcaatcagacagcaaatagaaaacagggaagttagtaataaaaaatgaattaggacgattagcaaaaggtgaaccgcttccctcctcaggcgacaggcagagttgacggagctttgcagggtgcctcctgtccaaacacacgtctggattattgcagcctttggggctggccctggggtcttctctgcacataggacttggttattgcatttagttttgcaaaggtcatggacatcccctcggaggggctttgaggggctcacaccaggattgggggcccgcaccctgggttgggtgaaggcaaggggttggagaggggttgctgcccccccccgccatttctgactgagggcaggtcagcggcttcttcctctaagcagagacatcagtgggccttgcttccctccgtgcatcctccaggggcctggacaaatctcatctgcccctctttctaacaccttccccggggttgcttttggggaacatttcctggctgtctggtggcaggggcaaagtcccttcaagaaggaagtagaggcaaaggctataattgactaacgcagaccctggggcaccaaagagaaacagaattctagtgaccaagtaagttcactagagtttagagctcaacagaagggtgagaagcttctacctgggtaaagttgggcatcacactcacctggagcaaaggggaccacgttgacccccacaggtggtgaatgtctccgttacctagctcatttctgtagctgcaataccatcaggatttcaacatgtgaactttggggggaccacagcattcagaccatagcagataacatgcacattagcaatacgattgccatgacagagtggttggtgtggttaatacccaggttagttggctgatccccacagagggctggtgactgcctacctcaggccagcgcagctgaaactgaagagcacctgaatcacatgagggtcttgtgagaacgcagattctgattcagtaggtctggggcgggtccagagatctggcatttctaacaagggctagatgttgctgctcagggggccatgctttgagaatcaaggcgcttgtgttaggctgagattctagaagcagagcctgagacgagggttcttgtgcgagaggtttggtggggagtgattgcaggagaaagggggaaggccctggagcagggatgttacgagaaagcgggtcccacctggaggctggggtgttgcctctgcagcccacatgtcagttagtcattggccatgggctgcccaggacagggagaggtatcatgcctcctgtgccacctcccagcaggtatttctccagagggagcagctgtgggcagctgtgggcatcagcactcagcccccggggtgtgggtgcacagcctgaaagaggggttctgggtggaactcgtggtcatccagtcacagtatctttgcctgaggatggccttgaggagggtggactgggaggcaggactcgggctccgatgtggactctgctgtgtcccctggggtggccgcctctcctttctgggagctgcgtgtgctgcaggttcacaaggtgatggtttggttggtcctttgttctggtcctcaggctgtgatggaaggtgagggtggggatggggggagggtctgcacaggaagaggcagctcttatttcagagcccaaggtaaggagagagagagagagagagagagagagagagacctgccctcagtcagaaatggcagaaattaccactgaggcctgcagtgttcagggaggacttcctggcagagggaaactttaggtgggacctccaagaagcataggaggagaacatagaggaatggggaaaggcagaggcatttatttagcatccatcacaggatgggtatttcacttacgttatttatttaatcttcacaacaatcctatgtagaaagccacctccaccgtgcaggtgaggagctgaggcttgagaggtgagggcactgggccggggtcacagtgggattggaacccaagcctgcttgccaggaacatactttctcttcctaagggaccataccacatagggagggggtgtgtggaaaggggaggggagctggaggccttgggaattactgcagacctgactggatgggcagaggctcgtgtagagggggctgggaggacactgactaccaggctctggggtttggattctgtatggggagccatggagggctttggggcaggcgtgatggtgcagtgtcatgccctctgtcctgggaccctcttcccatcccaactctgagccagcttctccacattgtccaccctccctggattcagacttcatctgtgtgtgtgtttgtgtgtgtgtgtgtgtgtgtgtgtgtatgtgggggtgtgtgttggggtgggtggagtccatcctggaccctttctgtagaccattttttggacatttgggctactccagacaggggtcatctatttttgctgtaagtgttttgtggggcagaggccaggctaagctgccgacagcatccctggaatcatgctctgtccaggaatcttagtgacagctgggtgtctggccactgtggtgagccttccttctctacccttcccatgcagccagccccattctgtgcactggtgccttgggggtgaatggaggaaggagcacaaatcattatcccagatgaagacagattgggcttggggtgcgtcaggaccttgtggggaggattcggttctgaattattttcagtcttctttgctctgtccccacctctgtggcctgagttttctctcccagtcaaagctgggaacatccaactctttctccgccatcttccctgtaagcctctcctgcgtaggatgttatataagctatagtcacagcttggaacctggcacgatatgctgatatcaaacatggaaactgttagtgctaagctgctatgtggggataagatggtcgaatgaaaggtaccagtggagttggggcggggacgaggaggaactactgttcagtgaatacctactatgtgccaagcactgtgctaggtgtcttttgtgtactatcttatttaacccctacaacagccctgcaaattatgtattactattaaccatgtcacaaatgggatacctgaagctcagagaaacttgcccaaggtcacacagcctgtaagaagcagagtggatctgccgggtggggtggctcatgcttgtaatcccagcgctttgggaggccgaggtgggtggatcacctgaggtcaggagttcgagaccagcctggacaacatggtgaaaccctgtctctcctgaaaatacaaaaatttagctgggtgtggtggtgcatgcctgtaatcctagctactcaggaggctgaggcaggagaatcgcttgaacccaggaggaggaggttgcagtgagccaagatcatgccattgcactccagcctgggcaacaagagtgaaactccatcccaaaaaaaaaaaaaaaaaaaaaaaaagaagcagagtggatcgtgaacctgaatccgtctagctctgaagtcatggtctttattctgcaccacatattcttgcatgcacaggggtctttagcttccttttggagaccctttcatgtgttcctcattgagactcagaccatcaacctgagaagccttggcatggcgtcttgtcattcccactggtagagacaggcagacctacccacagaggtgagtgcccaccttgtcccagctcaaggcaatgtcataggccagcaggctcaaactcagggtctgaactttcctgatcccagctgcttcccagcccccaagaggctttgttgttttcaacttgatgttgagtagaccagacacatgttctttggctgtgagtattatcagcgcaaatgctcttatattagctcctgtattggttgtgtattgcttcacagtaagccaccagaattaatggcttaaaacaataaccatttcattaagctcatgattccatgggttggctgcaaggcttcctggctaggctggttgtctctacaggctctccctccctgcatcatggtcagttggccagtggcctgggagctgggtgatctaggacagcctccctcgtgcagctggcagtttgcatgctgctggctgggggctggctggttgttggctcagctccccacatgacctcctgtcctccagcaggctagctcgggcatgtgcacctggggctcccaggctccctggtgcatcaagagagagcaaaccccagtgtcctggtgcttttcaagcctctgcttgtgtcacctttgttgttgtcccatttgtcaaatacaagcatatggccaagcccatattcaaagcataaagagagagatgatgagaggagtggcagcctcacggtgccaagggcatgcatgcaggacaggaggctatgattaggattagtggtcatctttgtaatctacacagctgcccccactcttcagacagcagacattcatcgagtccctgctgtgtgccaggcactgtggcagggaacaagacaggccttgtgctgtgggcatgtggcctctagtctagccagtgaataatcacatgatgaaacataactaaagcagaacaggtgtgatgaaggagagccacacagggccgggagaccaggcaacagagagctctggggggactgtgggaagactaggagttgctagatgatgggcacgggggaagcattccaggcagggaagagcacgcgcgaaggtcctgtggaaggaggggcctggcacacttgaccactccaagaaagtgccagtttcttttaagtgtcggcaaccttgggctgggaaaggaacttctggttcgcaaaggtcccctgagcatttccgtgcgatgcagtctcaggagggaggtggctgataaccttcccacgggcagctcctgggttttgtgggctgggagaggagacccaggagggatttgagcattgggaagggtgttgtgggcacagagttcagtttgaggaagggggaggaggaagcaaggaaggggtcagttgcagaggatttgggagggactggtgtgtgagggaagtgaggggttttggactcagtcctgctggctggtggtctttgaaccatggactgagaatgaggtgatcagatgctggggaggcccgtagggagggtgcacagaggaatgacttggggaccctccccagccacaccccaggtctccaaccctaagccagcctctacgtccatgtgcagggctgggagggccatcctgggggcgaccgcagcatcgagtccccatgcggatctgcctgcccagtcccataagcagcctttgatgtccctggagccttcaacagcttctctgaaggcagatcaggggctgtggttttggaaaaggcctagcatcactgggtgccagaatcatgatcataaatgaaccagcacagattggaaaaatgggaggagtctggagtgtgggttccagcttcttgccaatgtctccatgaaaccgtgcaagtagctgcccagtcctgagcctccgttttctcacctggaaatagggccagctcccatcctccctgggtcaagtgaagaggaagctttgagggctgttaacctcagcaccttcagtctaatgcttgtggacaatgcgggcaccccagtgactgcacggtggagtgaagcaaactctcctcttaccaggacccatgtcagtggaactttcttccccagaataaatagaaaccatggcaaccgggatatgtcatgtggactggcagcctgtcccagtgatggccaggagaagggcctggcacagatgcgggccccactcacaactccacccgctgtgggatgacccaccgggaccccttagtcctcccctcctgcctgaggtaggactgagaagttcagtcctgaccttgggtttccattcaacctcagattttattattacttaatagtaaaatgcttgtcccggaaagcacgtctcaaatgagataagttgaagcaatcctggctcctgccccatgtcctgatgggtgcactaggagttatcaggatactgctggatgtgggcactgaaatggcagcaaatctactctgagagggagggcgctgagcctgtgagcgccttcagtcttcagatggccagcgaggtggtggcattaatatcccactttacggagagcctcagctctttacccgggattcacagctagtatttgacagagctggcattcgaacctgcatcttcatgccccaggacttatttccacactggctttagctgaactggaggcccagccaccacatggcaggcaaagagcatttgtcgctccctgcattgagggggtgactggtctgtgacgcctgcccccagcacaatgggtccaggggtggtagaggggcatctgaggcagctttgaaggccagggggtttttccagcccttgtgtttctgccttatggcctccttgtgcagctctggcaggagtggacaggtgccctcgcttctagaagcatggtcttgccttagctggaagttgagggtggagcttcctggagtcgctggcttcacctgcctctgcagccatccagacaggatgccaaagccccagcttgggtaacccccttgtctcttggagccccagtgtccttatctgtaaaacgaggagatcagtgactcagggacagcatagcatagtggtgctgtgcatgcacgttaggtcctaggaccttagttccaattctgtctgtgacaattactagctgtgcacatctagtaagttacttaacctctctatgcctcagtttcctcctctgtgaaatggggataataattgcatctacttaatttgtggtaaggtttgcatagggatttcatcatattgggactggaggagttgagtaagaagaaagggcaaaaccttggtctagcttccgccaatttctgggcaaaagctgaagttagcacaaagtcagcccaagcatgctccactgcactcaaagtacagttctgctgccagaacccagccagggggaggggatgggaactgtataagagtaggacggatgccaagactagtgaggcattttaacaacatgaggctggaatgtggcattgtgtaagtcccacaaatgaatatgtgcggtgaggttggaagataagcgagggttcatttggtgagaccattcgtatagtcagacatgagtttaaactgaccctgcagcttagaagctgtgtggcctcaagagcttacttaactcctctgagcctgttggcacacccaaaaagaaaaacaactcatttcattttgctagattgtctaaggattaaagagatgacagaaagtaccagtgcctggcacagagtagatgcttactaagcaccccaagagtgtcttatggggtgcttatgtgattcagtcggtgctgctgctgagtgaccacagggatatgctcagatatgctgcagaggtttccttctgtagttaaagggcagggagtcatgccctgtatgagacatttttccttagggaaaatgaagtcatgggacttgttcatctggatagtgcagtccaggggtgtatggggcttggggtactgcaggcaagtccctgggacagtgtggctgagggatggggcattgggtctaggagcttggtgcagagctcaatcaggaaccttgaaagaaaacacaatgtgaagactttctaccttgaggacagtggggccgtggaaggattttaaatggtgggacgtcactttttttttttgaagagttggtgtcctactctgtcacccagactgaagtgtagtggcatgattatagttcactgcagccttgaactcctgggctcaagtgatcctcctgcataaggctcctgagtagctgggattacaggcatgcgccaccatgcacagctagctttttttttttttgtctgtttttcagagataggtctcgatatgttgcccaggctgctcttgaattcctgatctcaagcaatcctcccatctcggcctcacaaattgctgggattacaggtgtgagcaatcgcacctggcaactttttttttttcccccaggaaaactctactaattggcctggaaaataaatgggggagggtgagctaaggggctgctatggggatccaggccagaagggtgagaggctgagccagagtcgcagggatggagggagaagaggtgactgcagaggatgaggcagctatcagggcaccctaggggtgtggtgtggcactttagtggtcagtgctttgcagagacgaggcacatgggattaagcaaacacaaaatcccagtgggcatgaggatgtagaccagggcaccttagaagcgcaaagcggctttagtcacttcccttgcgtgagatttgtttaatagaagcttgcagcttcgcagcacttaacaggtgctgacgggggcatcacaatattgtgaaattaagctgtgaagccgacttcattaccagcttacctggcgatgaagcagctgccttagttagcactgatggttgggcatgacagagctaaaattgaacttggcaattactgctcatgagaggttctcagtactgtgaaaggaaggttccatggaaatcaaccctggtaatcacagggtttaaaattagtcagttactattaaggttgctctgtcagcatatgcttcagggtgatgtgagggaagggggcgtggaagcttgggtttgggctgttgtgggttaccttatgttcacctgcactgcatttaagaaaaaaagttggttctaggacaaaggttcgagagtcccagggttaatatcatggtgcagggtggccatttggataataggtggttttaaagcctttttttttttttttgagtattttttgagacagaatttcgctcttgttgcccaggctggagtacaatggcgcgatctcggctcactgcaacctccgcctcccaggatcgagtgatgctcctgcctcagcctcctgagtagctgggatgacaggcatgtgccaccacacctggctaattttcgtatttttagtagagatggagtatcaccatgttagccaggctggtctcgaactcctgacgtcatgtgatccacccacttcggcctcccaaagtgttgggattacaggcgcgagccactgtacctggcctaaagccctgttctttttatttgcgtaagctcacaccctctcagctttggtgttttctattgacttaaggaggtttcctgactcgcttctggtctctccttgggatgttgcacaggaagagctcagctctctgtgggttcctccttgccctggaggaagcaatgatgtgataggatgggaggttcctgagtccttcacagaattgtttttggtaaaccttggctggaacatctcagcaatctcagaagatttgtccccgttttgtgaataaagacagcaaggggctgatatgggcttggttgctactgtagtgaaaatcaaaggacaaagcttataatgattcaattgtgagtttgcctgggctgtgtgcactgaccctcatcaataagaagatggaagttgactccttgctgtgagcctcaacttcctcatctgtaaaaggggaacttgttttgtgcaagtgtgaggattaaatgagatcatcaaagcacagtagaacctcagcatggtggctgttggctattaacagtgatatttatggaccagaccaggcactttccatcgatgacagctgctttgacaaaaaccccaccaggagggaactattattcccatcttaacattagtaaacagaggctcagagaggatctaagtttggccaagatctaagggtacagccaggattcaaacccaggcattctggccacagagcctggccattgtccctgcccctcaccctgggaacagctgaacaacaaggaaacaagtaacatcatagctcatgcctgtcatcccagcactttgggaggccaagacgggaggattgctttaggacaggagttagagaccagcctaggcaacatagtgagaccctatttttacaaaaaaagaaaaaacacaaaaattagcagggtgtggtggcacatgcctgtagtcccagctacttgggaggctgaagcaggaggatctctcgagcccaggaattcaaggctgcagtaagttatgctcatgccactgcactgcagcctgggcaatagagggagaccctgtctcaataaataaataaataagagaaaaaagaaaagaaaaaagaaaacaagcagcttggacaagctgcctccatggataagaagagagaagcattaaaactgaaagatcatttgcaaaaggctgcagcttctccacaggaagctgagtcatctctctttgttttgaaccgtaaccatcacgttgcctcagaatctgaaaaattaaaaaagaactaaaaaaatgctgagtttcttcatggtgcagaggcccttcttgtctccacaccagaaggagctgagcagaggggccacagcgatgggaccccctccaacccacattaaatacctccacctgaatatttattgcaacggcaagagcactgcacctggaatccggtctcacagccttggatttgccttgctaagcctcagtcatccaacctgccaggcaggtgcacctgccgcagccctgccttctctgtggagctggtgctctcggggtgcacgagtcagggttgggaggatgctttctcacctgtacacctgtggatggtacgatcacaaccccaaatgcctcctcccagtacatttggcagaattcagtccagaatctgggccttggcctagctcctataaactccctctcctacagatggtggggttcagtaagagtttgatgaagaatgcaggggctttctgtgcttgtctggtatcacccagcttctgccttttaaaatgcctcattccttatctgtgtactcaaactctgccccttctccaaatctcggcttgactgacacctttttcatgaggccctcgcccaggtgaccaccctgagacccttaccggtgagtactgtcttccttatactcacctctgtgtgtaagctgggcttcctgtgaggacaggggcagtgtcctgatcacacattgctccagcttctggaattatgacctatgtgaagtagggaggaggcagagggaacaacaaaaaaaaagttttttcagtgaatgaataaataaatgagacttgaaagatttttacctttgtgttttctctctgacaatcaattatacctttcacttatctcttgtttctgatgaacaagtttaacattcaacaagcaacatggcttcttgcaacatcaacaaatgcccatcattttcaaggccgcatagtattccattctatggagagccatgatttatccaatcctctatcgatggactttattgtcattttcatcttcttataaataatgatgcaataaatatccttgtccacacgaatttgagcctagaaagttctttatcatcctaagcttatataaatattcatggacaatttcctcttgcatgcttacagctttgtgtgtgtgtgtgtgtttctaaatctttggtatgtctgaaattttcatccatctttgtatcgcggtgcaaaatgcacctctcttttgccttgagacgagtgtcatgtgccttggatctatgggttgtgtgcactttctatctggtgagcacgcactgtgtgtcaggccccatgctgggagccaggacccagagatgagcaagacagacgatcctgaccatcaagaagctcagagcctagagaagaacaataaacacagaaacaaaagccatcaaacacatgaacagaaacgattggctgcaggagtgtgctatggacaaagtaactcaggtgcaggtgagattagaggagctctctttggggaagaaggagatctttgagcagagctggaaggatgagaagcagtcagttgtgtgaaggtcaggggaagagcattccaggcagagggaacagcatgaaaaaggtacagaggcagggaagcaagacttttttcctttctggagccttttgtaatcccccttccagcctctccctcctcctgcagacacgctgggcaccagccccctttatcacatgacatttgctattcccaggccgttctctctgtcacttactttagtattgttacaagtgttcaggaataggatgattccccagagcgcttcctgcttagtctggatcctctcagctctgtggtgcttcctcagcagcctttgctgctactgaaatgtccaaaaaattaaaattagtttaatagcacctggcatagtacatgacacttaataggtactattatccccattttacaggtgaagaaactgaggctcagggaagttagccattccagcaggcagagctaggattcgaacccagctctgtcttatttcaaagtctgccttcttcatggagccctagtttaactgcatttgtgcgaaagctaatgagagactgctggttaatccttagtgcccggggccagctttatcccaagcccgatcaaggcttgtggtgggtgaccttggcctttggcctgatggcttcagaagagtggaaaggaaccaggggaggttcttatttttttgttttaaattacaaatgtaatacacgcttgtggtaaagaaaaaaaaaatgaaacaagaaagaaaaaagcagccactgaaaatatctcctcctccctagtgtaactgctattaacagcctggtatcttttatagtgcatgttcaaacacatacatatacaccgttattgtttttataaaaatggaaccatgtccttgactttttcttgcaggcagttccaagtcagtacctacacaccttcctcattccatcagatgtatttcagtgtattcaaccagaccctggctttcgacatttagctgtctctaattctctctgtaacaagcaacatccttgggcatgcatccatgcactgagtacaggtatttctgcaggatggatgctcagaagtctaattgctgaatgaaagggcatgcaagtttcacacgttgacaggtgctgccaatttgccttccgaaggctcttccagtgcaacacccctcccaaggcagcgtgtgtgagtggggaaggctcttaagccacaaatgacgtggagccgcgctgtacttaggggctgcctccccttctgctccccgagacctggcgtggagaccgccaccaggagctccgaacacgcaggcccaaattggaataggagatggattttgataaaagaggttaaataacaggtttttccatttcaccttatacgaatgggatggggggtgggggtgctgggcctccagccaatagaggaccaagagttgtcaggagggcttataaagcttgctatttctggcattttttcctctttctctgctgattatgcagcagactcgcacagaggctgtcgcgggcgcgttctctcgctgcctgggcttctgtggaatgagactcgggctccttctacttgcaagacactggtgcattgcaggtgtgtttccgcagaaggtaagcagcgggtgcccaccgccccatgaggtggaggtggtcaggccgtcactgtgggctgaagataggtgatgtctggatgggggcaggcagggacctggactggtgcttgtcacattctggaatgaagatgctttagaggggccaggaggcctgcagttggcagctccttcttggagaggaattctggaggcggtttgggctgtcctctggagagcagggtcaggctgtggccttggtgcccaggctgctcaggatcattcattcattcattcattcattcagcacaccctgcagtaggcctggccaggtgtgggttggggggtctggctgattcagactggaaacaatgggagcagtaatggggatggcccatggcttgggaggagcccagaagatacctgggctgaagagtgacaggggccttccaagaaggcaagacgggtgagaagcagctgaggacgtcaccaggaatacccgagctgcctcttccactagattttggagtttggggaatcaataaaaatttcttgccaaatttggtgaatgccaccttttccgtttgtgaagtaaggacattaaaaaataaccagttgggatctctacgcagcatactttcgtagaagaaaggacagcaacaaatgagaaaggaactaaggggacttaaggggacacacatgcccttaataggtggcagagatttcaaatgcagaaacctaacgtgaaggggccatcccagctgtgcctgggaggctatcttggtgatgggagttgactgggttgggggcggggcttgttgctgttgatggtgctgcacccagcagaccaggagacccgacctcttctcgtgctctgatttatcacagccattgttgaaatctggcttcgtgcatgtgtgtcccagcaaaagaaggctcccgctcaggtccgctttccgtcatttggaacatcctgggtgaactgggagagaccaggaaacaccagcttctgtgcctcctgggatggtttctaccttctccactctgggtctgaaagcctgcaggaggcagtgggcccaggtctgcaagggaagcctgaggagccagctggacacagaatgtagctattgagcacctactgtatactggggtctgggttaggcactgcttacatatctcagctcggccataaatacaatctgtgacatagggcaagttccttgagctttctgtctcttcatccataaaatggggacactgatgcctactttcttgtgttgtcatgatggtgtgtgtgtataagcatttacgtgtgttcatgtgtatatgtatgcacacatgcacgtgtgcacacactcactgtgtaacactttgcctggtgtgtggaaggacctcattaatgaggcatgaatgaatgaacaaatgacctaggatgtcggctcagctcatgaggagggcgtggctcacaacggcatgtgtttgtgtgcatctgcgtgtgtgatccagggagctctcttcttgtgcttaagagtcagaggctctggaatctgtttggggagcttgaagggagggccatgtctgtttcacagccctggctaataggaattctttgtgtttctggtcacttccatgggttcttgactgggagaggagttcatggcaaggactgactggccattttgaaagagaaccaaccgatccttttagtgttaacacttcctgaacaacttactgaataccactcatcagcactgtgttggtggggccctgggaaaacagccagccagtaagccagcattcagattgctacctgacgacctgtttgctgagagcccctggctgggaaggaaggtgctggaaggaaaggagtcttggaagggagagagtggctgagaattgcaccctcacacatgctccctgcctggagaacagaagctgagccaggtttaagaccttgttttaagtcatggctctgttccttacttgctgtgtgacctcagcacagcaacctctctcagccagagcttccttgcctataaaatgacattgttaggaggactaagtgggataaaatatgtaaagcacattgttggtgctcagtaaataacgtgttctcctggggagggaagaggccctggagagcttttgcctgaaaccagggtgtctgttggcacacaggggcccaaacacggcaggcacctgctgaatatttatgggaagaatgaaggtgtgcagaagtgggaggcctgagttgcagggcttttcctgccattagtaattgctgtgtgatcttgggccagttcttcatcccctttggacctttgattccctcagaagaagagtccaggctgatggcttcaacccctgctcttccactgtgttggaaatcgggtatgtgggagcctccagagcaggatgagcttcatgtttgaaattaatttcctttcctcggccggcggcatccctgatgactctcccctgctgccttgtgcatgaacaaaccggtaattaatgaaattgggagcaggggcagggaggtgaggtttccagtggaggcagctgggggtctgctggggcagcctctgtgccacccactgggaggccccgggcctgctggggcagcctctgtgtcgcccactgggaggcccagggctgcccaggagctgccatctccgtctagccagggggcctggcagatgttcacacatctggacagttgcaaagggaggcatgaaatatagatggggagatggggagtgaattctccagcttctcctgggcctggggagccattttccagggagggcctcgggaacctcctgctgttgggtgttgagatgagcctggagtagcaattgggtggacctggatttttagcctttggtctcttgacttctagttgtgaggcttgaggcagctcacttaacctccctgggtcttccttgctgtgaagagcaattgaggccatgggagcagcagccccctagtcatggggggattggtgtagaaaggcagctttgatttgcatgtcctcaccccaggggctcatctagaaggaaacagttactctcaatggcccttttcctgattcacaccctccgtcacctcaaaatgccccttctactttgtgcccactttttatatatgactgtccacccctcggcttaggccacaaatgtgggatcatctttgacccctttctctgccttactccttgcatctaatccaactgcacttgctgctggctgtaccttcagggtgcaatgacttctccccgcttcactattacttgtcaccgggatgaccgcaggagcctcctcccaggcctccctgcctccacccttcctccttagtctgttcttctcgcagcagccagtgggatctctgagaaccacctgatgcgcacatccctccctgcttaaagcctgtggttggttgtcttttgtaatcagctggatctgttctgatacctttaatatacccacctgggggagctgggcacctgtctgatctcactttttgcagtccacaagctagcttctgcctcctgcagaatcactgtcctgccacctcctaaatccgcttccccactgaccaagctattgtgcctcttaattttactttcagacccctttgtctggaatggttcttttaccccttggactcctgtttattctcgcaggtgtggtcacgacatccacggctttccagaagccttctctgattgcccccaccgtctagccgcaactatcagagccagggtccccttccctgtgcccgcttctgtcattgtcctccccatcagtgctgtgatgctctgggaggacatcacccacgatgatgcacctttattctcacacgtgctgcaaggccagacagcacagaaatgttaatttaggcagtagatgcaaaagacctccctgcaaattaagggccttcagacctagacagactggaataggatcctcaaactggtttgatttggctgtgaccttggacaagccacctagcctctctgctttggagggtcacgaggattgacgagatgacatgtataacaaacatcctcctctttcccacttgctggattgtaagtgttcccaaagacacttggaatgtttaacccctcacatctgctctgagcagagcaaactcaacaatgcatagacgagcccaccacagaaccccaaacaggagcaaaaatagcagccatcggggcaacctgagatgcagaagccacaggaagaagccgcaggccaagcggatgtcagcggctctgaggccctgctgaggttcctcggatgtgctgagctctgcagccctctcgcctgccctcgctggctccccaaccacagcatcagataaggccggtggaaaaagtgctggcttcctctttctggggaggggtaatctcagtgccatctgtggggcacactccatccccagttgcctctctggcctcccctccccctccccactgcttgctctgcctgtctttgctggtctctttgctgaccgaggtcacacctgccggcagctcccatcttagggcctgtacacaggctgtcaggccctggaatgctctccccaacacatctacttggctcactccctcacctccttccagtcttggctccactatcacttcctcaatgaggcccaccttgactgctctgtttaaacgtgcataccctccatctcgacattcccaatacccctcacctgctcaactctttcttctttccatataccatgtaagtcacttattgactatgtgtattgttttctatctccaatgcaagagcgtaaactccaggggtctttgttcactgctgtctcccaggatcccagaatagtgcctggcacaaagtagatgcacagcaaatacttttttggtgcacggacgcatgagtacatgagtaagaaccagcccagcaatcagaagaggttcaggctagattttggggtgaggggggtttgtttctgggctccaggccccagggatgggctcacgtagtcattaaggattctggccccatgattgacctgcattggccagaagcccctgctgaccttcagggcgatagctgtctggggccagagaagggtctggaagcctgtggtccctttcaggagggacccttgcagtagttaagagtttggctttggaaccacattgctgtgggtttgaatcccagctccaccacttcctaggtagatagccttcacgtctacctctctgtatttgagttttctacctttaaaatagagtagataggccggtgtggtggctcacgcttgtaatcccagcactttgggaggctgaggcgggtggatcacttgagtaccggagttcaagaccagcctggctaacatggtgaaaccccgtatctactaaaaatacaaaaaaattagccgggtatggtggcgcacacctgtaatcccagctactcgggaggctgaggcaggagaatcactcgaacccaggaggcggaggttgcagtgagctgagatcgtgccattgcaatccagcctgggcaacaagaatgaaactccacctcaaaacaaaacaaaagtagtgaattctgaccttgcttgggtggtgattatgagggttacatgcaatatagataaagtgcctgactcatggtagatgatcagcaaatgaccattactattaaacttattatgtttttttttttttttttttttagagaaagggtcttgctctgtcaaccaggctctagtgcagtggcatgataatagctcactgtagcatcaaactcctgggctcaagcactcctcccatcttagcctcctgattaggactacaggtacataccaccatgcctggctaattaaaaataattttttgtttgtttgtttgtttgtttttttgaggccgagtctcgctctgtcgcccaagctggagtgcagtggtgcgatcttggctcactgcaacctccacctcctgggttcaagtgattctcctgtctcgccctcccgagtagctggaactacaggcatgtgccaccacacccggctgattttttttttaaaatttttagtagagatggggtttcaccatgttagccaggatggtctcgatctcctgacctcgtgatctgcccgccttggcctcccaaagtgctggaattacaggcgtgagccactgcgcccagcagaaaagtaatttttttttctaagagacggggccttgctatgttgctcaggctggtgtcaaactcctagtctcagctatcttctcgccctggccccccaaagctctggaattacaggtgtgagccactgcccctggcctaaacttaactgagcatgttagggttatgctgccgtaacaaccccctgaatctcagttgcttatcataaggaaggcttatttttgctcttactatgtgttccatgacaatcagcagagaagtaggggttgggctctgctccacagatcactcagggctgtaggttggtcaagtctcgaccatctggaaccttgctggtcctctagagaaagcctgcagatctcaagtttgcttttttatacttctacccagaggagacccacgttgtttctgctcataacccattggtctaaactagacgcatagctccaataaatggtaaggggagcctgaggtgtagtgtcctatgtgccaggaaggagaggagagccagatattggagagcagtagtaaagtctaccacagcaggtacttccctctctgccctctccagacatataggcagactgagacacagttagtcggtacttacgggactcactgtgggtggctgaataatgacccctaagtatagctaggtcctaatctttgaaacctgtgtatgttactttaaatggcaaaaggggctctgcagatgtgattaagggtcttgggatggggagagtatcatgggttgtctgggtgggccctataggatcacagtggtccttataagtgaggaggggttgcagaatcaggagaaggtgatgtgaggatggaagcagagactggggtgacggctatgaagatggaggaagggaccacaagctaaggaacacaagcagccactagacacagggaaaggcaaggaaatggattttctcctagagcctacagaccagccagccctgatgacaccttggttttagcccagtgaggctgattttagacttcgggctttccagaactgtaagagaatatgttgttttaagtcacctgtttatggtgatttgtgacaacagccctaggaaactaatatatcaccttcagtcagaaaatcatttgagacccagtgcatagaagccgcctctgtctgctcagacagaactgaccccttcctcctgtctgttgtggcgccccttgtacctgtctgtcatcacgttcatgcacaggcagaggtgtctcttaacatagtccttccactcccaacccgcatgctccaacatgtatgcccacactctcagccactctttgagcctctcattgcttgggctgatccgggttggtgtgtgtccacgtctgtaggaatgcagggcaggctggtggcaaggtcagtgtaaaggacttgtctctggggaaagggccctggcatgccccaggagtggctcagttggcgggagagtagaggccctgtggaagatggtgggagggtgaaggatggggctggagaaatcagcagggaccaggtcaagcaggaccttaggaccaagagaaagaggtggatctttgttttgaggacagagaggagcctagtaggattttgagcaggggggcgactatggatgactgatgactgggttctcctggtttgcgactaggttagaagactgtctttgtcctcccatcttctggaagtcaactctatgccagacactcctgagctatgcttttcacaggatttctcatgcatccattttatagaggagaaagctgagactcaaagaatggaacctcatggaatccatcctccacgtggctagctgagtcatcttttaaactataaattaaagcatgttactcccctgcaagaactctccaagggcttcccatctgggatgaaatccaagtgccttatggtggccctaggaccccaaatcacgtccttgcctcgcccctctgcctactgtgtcctgcctgttattccccctgcatgcgagagcttctacttgtggacctcagggactttgcattgctgctccctctgccttaaatgctcccacccactacttgttgcctgacagcctccttctctctcttctgggctccctcagtttaattgctgcctctacagagagaccctgtctccacacttcctgtgtttgctgcacagcacttagcacaatgcaacgtgtgaccacctttgtgtgtttgcttgtttgttgcctgcctcctgcagtggactctgaggcctgcaggggctgggactgtgtctaccttgcttctcgttgtgtcccagcccccaggagctggtatgaagggggcactcagcgaacaaacctctgcggaaagatgaaggatgggtcctgtgtgcagagggagctctggacctttgagggtggctggaggctcctggacctgccttggaggacagacaccaggcaggggccagctgaggaggagtgccagtgatttctctgggcacctgggcagccccattcctattgcacctggccttgacccactccctgtgctgtctacattctctgtcacattaaatgctctgcctgccatttcagcctctgggaggatccacgagggtgtggggagagacgtcagacctgggtttggatcccagctcagccacttaatagctatgagaccttgcacaattccctttaactttccaagcctcagtttcttcctatgtaaaatgggcatacagagggacagccttctagcacgtgactcctggtgcttgattcgcttgaaactgccttatctacaatccaaaaagccctgcgacgagaagttgttttgtcaatatgctgcaaactcatttggcccccaaaatctgacctgagctgacgcgaggctctttgtaatctttactcaccccacttgtgtgaatattcatatgttccactgcagaaatatgaatgtgttccattgcaggtgttgcctgaggctccactgaagctatggcataatttgcagaatttgcacttcattacttttctgaaattcaaacaaattctgaaactgcacgagttctggctgagagctgtggatctgtgcatgtgagtagctgctgaaaaccctcctgggtcacaggagggcccatgggggcctctggcagccatcgcagagcctgaaacccgttgtttccccttggctggcttctggtttcttggcagccagtgtcttcttagccacctggggttatgttgggttttgctggttcaggggcaggggttaaagcttagggcagggtgagccgaggtactcagacatttctgatgtgaatttaaaaggagaatttttttttaatgaatcatcagaagaaagaaatcagaaggaagtgtgtgaccaaggagaggaaattagggtttgcaaattgcatgagtcaccccctttctgactcctgggtgatcccttgcccttggcacttttcactcatctctgagactctcaaggccgtattctgcataacatgctggggctgtcatggttttattctggctccaaacctgcttctcattctagccatcagtataaatttctagttttgaatcactgccacgctgttttacttattattgtgttagccagtgtttcttccctgcccaagccctgctcagactcccgtttccccatcttagttagcatctacaacccattctccacccagaagccagaggccagtttctgaagtgcagcccacattccgggtttcagtctcatctccccagtgtggcccttgaagctcccttgtgataaggccctgcttgcctttctgtcttatcttgcaccgccttactattccatgaatgggcccttccctccagctcccaggctttggcaaatgctgttcccactggcctctgccctcgcctggctagttgtgtgcatgctgcgggtagatctgcttagaagccacctcttccgtgaagtctttttacaaggcccttgtctaggccccacgaacctggcttcccatctacttatcacccacccatattctgattcctggtcctgtccccttccctagaccatgagctccgggacaaagactgtgtgtccaccaggtgcagtggctcaggcctgtaatcagtcctagcactttgggaggctgaggtgggtggatcacctgaggtcaggagttcgagaccagcctggccaacatgatgaaaccccatctctactaaagatacaaaaattagttgggcatggtggcgcatgcctgtaattccagctactcaggaggctgaggcaggagaatcgcttgaacccaggaggccgaggttgcagtgagctgagatcatgccactgcactccagcctgggtgagagtaaggttctatctttaaaaaaaaaaaaaaaaaaaaaagactgttttctgtatatcactttaccatccccagcactcagagtaaaaggctgttttaagcaagactgttttaagcccttgagtgctcgtcccctgcctctggctagctgtgtctgcctaagagtggccaccatattgtcttccattaggctggaacccgtttcccatgtccgcagtggtgtgaaatatcccagttgcattgcagtaagtttattttatgtgcatttccccacttgccattgaatcaggtgtcccttttttcccttccatatttgtttcttaagatatcgcctcttgtgtgacttttgtttgaatcccatgtctttttgtctgttggcatcttgctttctgtttaatgtgactgagccatttctaccttgtatatattaactgtcttatagttggtgctgatattttcttagtctgatgtccttttcattttggttttattatgttttcttccacagaagatattaatgcatatatatttgaatctgtcaatctctcttcctctgtgattgcttcgagggctgaagaagttatcctgctccacagatctgataaacattctgttctgttttctgattgtttccctgtaacatgactttttatgtttaactctttaatccattcggagtgcatgcattttggttggtgtcttgcagtgggtatctagttcactgttcctaaatagggacaggataaccctcttgtccccattctgtttattatataattagcccttgtctctttgtttgcaaaaggggagacaaaatatagtagctgttataagcgtgagctttagcagaattaagattttggctttgccactttctgtgtgagctatgagcacgttgcttaaattgggcttgttttttcctctgtaaaactggatgatatcttcctcctaggaccgttgtcaagattgagcagaagatcatgtgcaaagcacatcacatgttacctggcataaagtaaatgccctcttttttttttttttttttttggcttaaacaaatatttattttctcacagggctagaggtcagaagtatgagatcaaggtgttggcagggttgattccatctgaggcctctgtattagtttgttcttacacttctataaagacatacctgagactgggtaatttatgaagaggtttatttggctcacgattctgtgagctgtacaagcttctgcttctggggaggtctcagaaaacttacaaccgtggcagaaggtgaaagggtggcaggtacacttcacatggccagcaggagagacagagcaagtggggaagcgttacacactttcaaacaaccagatctcatgagaactcactatcacgagaacagcaagggggatatccgcccccaagatccaattacctcaccatgtccctcctccaaaattgggcattacaattcgacatgagacttgggtggggacatagagctaaatcatatcagcctctctcctaggcttgcaggtggacagcttccccttgtgtctttacgtggtcttccctctgaaatgccctccttaatcttgatacgtttccatacctagttgggtccaacattgtacttttccttctgtttcattgattttagaattcttgttttctgttactgccacactgctttaattgtggcttcacggaatgtttcactctctggccagattgggcatccttccattactctttctttaagaatattgctttaaacacgcacctgttttctttagtggatgttgattttctctctcacattctgtactgtagcctacctcagtgacttctagacaccccttcttccccttccccagcacacataccggttttcccccaacctggctgcccagcctttgctcactctggacccactacctcacaggtatgtaccaactgctctcacctggcctatctccaccttagtgctttatcacccccctccaggtgccattatgcagatacccattttccctatggacctgagcttccctgggaattggttctaggtccctagtgcccctctgcacctggcatatggccaggtacattgtaggtgctgaggtcagggcttggggaagacaggaatgttcaccgtgcccttgggcttttgacagtaactgggctaaatctggcttcttctggaggtgcaggcttacaggactcaacaatttggtggttgtaaccctggacatgctcttgccaataacggtgggccatccatcagccctggccttggtttccccagtgggatttgcagaagccagaggattaaagccctcccagccctgaggcctcattatttatcttagtgggtccacagtgaagatgaattagaataactcattggcacatgccatgccttggagtgcagttttctgttttctgggagagaaaaggcctcttaggacagagccccccactgccctcctgggtctccaggagacagcccagatctgggtcagaagggttcaatagtcaagaacagaggggtggctctctgcctgggaaggcaactggggtgaaagcggggagctggcctttctctgcatactgctaggtagcatgcaaaaccctgcctgttccattcctgttctccaggggaggaatctgaggacgagaggggtaagatccctgcccactgccatgcagcagcttagtgcagagcctggacttgaacctagatctgcctgcttccagagctgtgctgcaccagtgttctcgcagctcccagtccaaaggccgacgttgagacagcgcttaaaaatatatcagcagtgtttacaaataccatttcctgtgttatctggtactgacagaaggaagtgaacctggcactttgtctgtgttaggtttggggttagaggcataagtgccaagttcagatgacctagaaaaacctttctaggtcaaattacaatttcaaagatttcttttcttcttctttttgaaccgctccaagatcgaacgctgtcgttgacatatttcccttccgacaacacgagccttttgtggcatgattgagggcttgttttgtagtgctggggagaaaatatcttccacatcatctgctcattgtctcagtcacactcgttccccccacaccacagtgcaacccgacgtacgctcatgcggcttttagttaattgcctttggtaagaatcagttttgggacttgttcccaactgcttggatgatagataattgtcaaatacaaatattggcagcgcagggcaacctgaggctctagactgctgactgcatcccagcctctagggagagctgggagctggccagctccatgttatgggaggtaacggggcaagacctggcaggagtacagccttctcattagagtgtaggctctggagttgaacttcctgggtttgaatcttcattccaccccttcctagctgtgtggccttgggcaagctacataacctccctcgacctcagtctccttttctgtaaaatgggagcctcagtaacttaccttgtgaggttgtcgtgaggattataggaacggatgtttgtcattcaattaagagtgcctggcttgttgttagtgtgatgtaaacattgcatgcattcgttctaatgagtaaatgatcatagccattagtggatgctcttgcgtgtcaccctagtccctcctcagatccaggcacacattctgtcagctgcttagagtgttggctgctgcccctatcagctgagcctctctctgggcagctccatggtgcctttggtggaaagaggaagccttggccaaggtcatcaacactcaccccctgggcatcctggatccgatggccatcccatgtggggatacagaatgcttagctccctgcctcaaactgggacacctctgctgggccatcccagttccagagctccccttgggacaggtggaggcctccgttgtgactacatcacagtttggcttgtccctctggcctgtcctgctcccccacttccctatagcacttcccagtacatttcttgtctgtagatttcacactcagagtctgtttggtacctgaaacaacaggtagctatccagacgctgaatggaatctgatttccattttaaagcacatgctgatttcacttgcttgtatttttggaagctttttgaggagtggccttgggttctctaccactcctgtctcctaccctgtgtgtgcacctttcgggcactgtcagcatgccttggtcacctccatgactcctggtgggaagaatgtggcctagctcctgggcagaccataaaacttaagactgatggaacggcccaggggctcagagggcatcacccattcaacccttccaggtatgaatgaggaaactgaggcctagaaagggggaggcctttttcaaggacacacagtgagtggtgcctgtcttttccatctttgaaggtgatggtgtcttgggatatagtgagcaggctggtcttaggagccagacatgtggctgttgtgatattatggcgctagggtccaatacatgttttacggggtgcccccatggcagaggggtggccaggccagcccaagagtggctatcagcaatggcttctggaaggaggacagcacaggagttgaatgggcatgaacggtgtggaagagagaaagcagggagtttcaggtggagacacagctgctgcagaggtctggatgaggtgtgggggagagtgtgatctgggcagggggcttggaaaggcagaagaggggatgggcgcgtgatgggtgggaggcagcctggactgttgggctggcaggcggcagatgctcaagtgaatgttgtggccaagaattaaaacttttccccagtggaggggatgggacttgatggagagtgacttggggagagccacgcagaggccttacccatcatggtccccactgaccctgcactgcctgagccaactgatgctcagtcaatggttgtggaataaatgagtgaacgaatgagggaagggaagatggtgctgaagaggaggcctccagctgcactgtggcgggtgggtgggagcagggacgagcccacaggctctgatgaaactggcttttggttgggggttttatccttctgagccagactgtgggtccctaccttccctcctgtcactggagaggtccatgggcctggcttcgatgagactctggggacgtggggagtgccggtgggtgagaccagccgagagcacgtacattggcatcccccacagcagaagcccagagaaaggcctcaaagtcgcgagcccaatcagatgaggtcctggccctgccccttggatggcctcatctcattacaccttgacccacttcccagcccagctccctccagccccaggcagcgtctgcagccctctttgaaccattccccctcacagcgccaaatgaaaatgtttgttgaaaacaacatgtgcataattaaagcttaatgagcgcttgtctgtttggaatgtgcaattagatttacaatcggggatgggagagagctccaaatggctttaaatggagctgagagagaggataatttttgccataaatctgcagtaatgcagacggtgtgtgagctaccagtggcagtaccagggaaggaagaaatacaggcctgccaggcctccatgctatctatgttagggggctgccctgcccatcaggcccggccctctgggcagctgcagctggtgagtgtactgggatgggactcactggtggtcctgggggcagagctgccctaggttggagctggagttcctgcctgcagcttatgagatctgcgatccagccaactgtgaggggctgaggggctggtgctgagtccagctgcccaggtccccaggatcccatggctggggcgagattcctgcgtcatcaccacgttcacccccagcctgcaaactggcttcagggcagagccctagactgggatgtggccctctactttgttctctgctgtttcccagtacccagagcgtacatagttaaggcctcagttaacatttgttggatgaatgaatgcctcgttaccagactcttgccttcaacaggtcactctccctctgcaaaccccatttctcccatatctatcacagagaaatggattcggctactgctgatgatgtcagctcttccgtctctggggttctgggtcaggagcagataatgactagggcagtgtctagaccagcaccatccagtagaaatacaatgcaggccacatacatgattttaagttttctaatagccatgttcagaaaaagtgaaaagaaacaggtgacattaattgtaatactttagttaacccagtatatcccaaatattaatattattccaatacatcatcaatatacaaatattgacaaggtattttgcattcctttttgttgtcatcgtcatcattcttgctctgaagtctttgagattcagtgtggactttatacttacccacatctcagtttggactaggcacaattcaagtgctcagaagccacgtgtggtaagcggccaccattctagatggtagaggtctagaaagagcacagttagagcgaggtaggtgggagggggcaatgattcccacctcccagaggagcccaggtacctggcagccctcacctgtggtgctatagtgaccactgccatttttacactacccctcgatgccttttattgactgaaataggtggcaccatccaagccaactcttgttgggggtggggacaagggtcctgaaggggcccacagcactgagcttgcttacaagggacattcccagctcctgcggcaggcagtgcccaaggcgttgtccttgcttctgatagttaaggtcccaggcctatagtcatgaggtcaccttctctggttcacgtggcttggaggcagtgggggtgggaagccaggatgtactcttaggagtcagcagcctggacttcagactcagctcaggcaggtcttggctgtgtggccttaggcagatcccctaaactttccgggcctctgtgatggggaggatttatcaccaggcagaatacgaatgtgcgttgtgcccagcaaagcaggcacaccaatcaggagaaaaacatttttgaagaattgttaatatctgatattttaggaacaaagcatgaaaatcatcgttgttgggaaaaatcggccctggcagttggactttcttataaagactttaatttgcaaattttatttcaaattacatacagtgggcacaggcatcgagggtcttttccatgattaagacctcagagatttgcacaaagccccactcagtttcttcatctacagaagagaggtagttatagcaactggcaggattcttaggaggattcaataataaaataagaaatagctaacaatgattgagtgccttctctaggtaggcaatgttctaagcactttccgtatatttatttaatccaaatgatagtcatacccattttgcagatgagaaaactgagacacagtaatgtagtttaaaaaaaaaaaaaaccaacagcttgaaagcaacaagcccaggatttgaaccctggcagccagaccagggcctgtgtttgtatccactgtgccatcatgtttctccaagtggtgatggacctggagttggtgtacagggcccgggtcaggctgagactgaggcttcccaggccgtgctctattcctgttcctcttccatctgtgccgggctctctgcctgcacccctcccccggcatcttcctggccctgatgtgtatttccccatgagacttccacataaaaccgcactctcggcaggacctaggttgcagctgtctctctctttagagctgtgttttatctgtgcagaatgagcgttctcaccgcccaatgtggggcaggcgggagcagtgtgtgctgctttgattgtttcctctttagatcttggtgaggctcagctctcagtgcctgtgactggctaggctgagggctgtgcatccctaggctttgatctgtgtctctgtgcagaggggaggagcaacagcttctacagaacagctgctgctttggtacctgggatcaaggccaagttcagacttcctgggtggctttggacaagttcccaaccactctgagccttaccttgctcatcttgacagtggggctgctgctcatggaagccttgggatttctagggggttccagtgagatggctggtcacagctctgggataagggctggtatacagtaggtgctctttggccagtgctcacagcagccttggatgtcatattccctgctccttgcctagtcacctcctttgcttcctacatcatggagcctccaagtcactttttcaggatgcttctctggaaagaccctctgccttgcttctgctccccttggctaaccttatcctggcctttgtcacatgtgtcaaagaagaaggcatcattcaatatcgaaagcaagaagctgaattcattggtatacttcgcaagggtagtctccccaaatcaagcaagaggctgatcttttcagggtttggggaagcatggggtcctgggataggaggactttcagagcaggaggttctgagactggctggctgtctccgtggtggacatgtggctattgggagtaagactattgattgactgactttcagaggtggggctgtaaagctcccagtgacaaatgaggatgagctttaagctggtttggggattcattgtttgcagcttgggactgtggtcaaagaacatcttttcctttgtagatttggagaataggaaggttttattctccctccatagctgtcatcttctccaaaggactgggggttccttgaaggcaggggccgtgtcatcatcattctggcatgcctggcacctagcacactccctgtcacatagtaagcacgcacaagagatcgttcaatgaacagtgattgttgcctccaagtccctttgcttttctctcttttcagtgcctttgtgatgatctatttgcatagatttcccaaggggcagtggcaaaattcacttgtagattccccagtggctgggagcatattcctcagcacgagatatgtgcctggtacacgatacaacaaaggcactgcctggtctcatttcgcctcagcacatttgaatgagatcttagacccaggaccaagagtgggagcaaatgggtagaagacatgggagggacagggtcaaggtgaagaggctgaccttgaacaggagagagataccttttcagactaaaggaaaggaagtcaagatgagcatgatgtaaataacgtaggggaggttgggagaattgagggaatatctgatggcttcaattcctcagtgacagaggagacaatgtcatctgctagactgagggagatgggggctgataaggggataggagttgatatatcataacaatgataataggtaacatttattaagcacctgtcaaaaatagttaatatctgtaacataatgcttaataatgctaactcatagctgatgtctgataacagataccaagaaccttatgaggtaggaatgtagctgtcataattgttgttttataggtgaggaaaggaaggcaaagtgaagttaaagtcactgagctcgtaagtagtggaaccagtcgtcagatcaatgctgttacccagtatgttacactgcacataggagttgaattaagtccaaagctgattttagatggaagcttttggttaggtccaagaatatgggtttataaaagcaagcaagacagtgttaaggttggagtttgtagccagaaataaagaagggcctaggaagaggtagatttcggtggatagagaaagggagagtgttccaggctcatggtgggacgatgtgtaagagtgggggcacttgctgggtgtggtggctcatgcctgtaatcccagcactttgggaggccgaggcaggcaggtcacttgagagcaggagttcgagatcagcctggtcaacgtggtgaaaccccgtctctaaaaatacaaatttagccaggcttggtggtgcatgcctgtaatcccagctactcaggaggctgaggcagcagaatcacttgaacctgggaggtggaggttgcagtgaactgagatcatgccatttcactccagcctgggcgacagagcaaaactctgtctcaaaaaaaaaaaaaaaaagtgggggcactggaggctcccactatgctgaggacccacgggaactgagacttggggctgccctggagggtcctggatataggctaagtgatgtggagtctctgcagggtttggatctgaggagtgaagcgattgcccaaatatcgctagtgatagccaaggtgtacgatggattgtgtgacacggacccaccaacaccaacatgggtttgtggtgcctgtgtgtgcccctacgctgtgcataccacatgcactgtatacctttgtgttcacactcagcatactcttagggaagctcagcagaaggatgttgcaggtgattggatcagagggatgtagatggcagggagaccagagtcaccccaggggtactgactgtgggactgtgtggaaggtgacagtttctgttaagacaggggagtgctggagaaacagcaagtccatgtacatgttatgagttcagtgctggaggtgttgaatttgaggtgctcatgggcaaatgggggagatagggagaaaactatatattagaatctggaggtaatttggctaaagatgaggatttgagaattggtgatgttgcaaccgtgagtagccatgacattttccagagaaagtgtgaatcgagtgagaaggaaatgccagacccacattgctatgcgcctatccattccacccaaccactcaacccattttacccacccgggaacccacacgtccaggcatctatccacgcatccccaacacccatctcacccatccatgttcatctcgtccaccatcccaatactcttcccatacacttgtctgttcacactcatgcagccatcccttttcacctatccattcatccactcctccctctcatcccagccatcccatccatacatcccaaccacccatctatttgtccatccacccatctcattaataaaccattcattaataatcattttatattgattacatgttgaaatcatgttatgaatatgttgagttaaacttaattttgatgatatattttatttatctgttaatatttttaaacagtggctactacatttaaaaataatgaaaagagtataattggattgtctgcaacacaagggataaatgcttgaggggatggaaacccattctccatgatgtgattattacactttgcatgcctgtgttggaacatctcatgtaccccataaaaaaaactgtggctactagaaaatgtaaaattacatatgtgggtcacatttgtaacttttattatatttctgttggacagtgctaatgtgtacaatccctcacccatctattcattcacccgtccgtcatctgccgatcatccgtctatccatcacccatctatcaatcatctatccacccatccattcgtccacccatctgcccatccatccatcccatcctttactccttcctcctttccatccattcatctacccacttatcacatctgtttaccccacaaatattttatttatacctgtcatgaatcagtgactctgtggtcataagaatgagaaaactgaggcttaaagcagttaagcaatttgcccaaggtggcacagatggacctgggatctgactgtctaagatcagggctcctcaccttggctgcctatttgctaagtttccttaaaaaatcctttggggaagcatggtgtgcttaggttgggggctggctgttggaataggggccgaggagctcttttccctgaggggaccacacagggaaaggagaggtaggggagagacagatgccttagaagcccctgtaagctgtgtccccggtggccgtcatgaaagggttatccctacacattcgatatttgcaaaaatgtgggttctttcagattccaaaactcatttccatgacaaaactcttgggaagagaagatgaaggcctggcttttgcagaacaatcttccagctgtaatgaggactgaagatggcaatgggaaaaggaattataattagaatatgaaatggggaaaattaatctattccagtcactggtaagaggatgttctcctggcgttcatggaaattcttaagctgttgtttctccctgcatttttttctcacattttaaagcatagggaaggctgtgtggtatgaaaaaaagatttttgaccaaggaactgataaactgtgaaatatgcatagaattgaagttcatgtgcatctttgctttgtatgtctctgtatgcacattcagtatatgtttgtgttcacatttgtgtgagttacatttaaatggctgcagatgcatggaatgtttgtacacatatgggcacaccctgctttccttgtgtgcgtgctgtggttattgtgtgcccagttgtataaaggtctctgacatgtgcacactcatgcctgtgctgtgtgtgcgttggttggtgttacccatggacatgatacatgagtgagctgaacgctgccgtgttgaacgctgtgctgcatgacctgggtccacacaaacatgggtttgtggtgtgtgtgtgtgctgcccatgctgtgcacacggtgtacatcatatacctttgtgttcacacagtgtatgcactgcggtgggtgtagatgtgggtgtttttgatcttgtctgtgcacatgtggaggaggaagtagccctgctgtgtctgagggcagaggtgactttgtgacctctccccttggcttccaagttcatttagccagaaaaggtcccaaatgaggagggggctgcaggggtaagccccaggccttagagtactggaagccaagccagagggagcctgggaaccctcagtgtcccccaactattccttcatgccctccaagggctccgatgtggtggaaccctggcagaggtgggcaaagaacaggcctccccgcccactcagggcctctgctcactgctgctccgcagctggttctgagcccagcaggctccagggcactgtgcaaggtgcccaagggtaactgaactgaggagactcaggccctgcctcgggaacctctgccagcttctcaagtgccccttgaaagccagaagcaagctttactacagcacgtggcagctctttcctagacattggttgaataaaggagtgaatgaataagacaggctctggtgacctcatgggaatccactgcccacccccttgcctgcccctaacacactcgtgtcggagaccaggcccccttgccctacatctccagtaccattcccactgctctctgtggataattcctccctctcctgaacctctaacacacttatcaagcacctgttatgcgccaggcccaaggcagactattgattatatagtaggctctagaaaagcattggtccctgctgtgaatgcacttgcagctagtgggagagtccaagcagaaaaaatccaacaagggactcttaaatcccatctctccccagctgtgtgatcttggacaactgcttatcctctctctatctgtttgcttggttttagcagggaaaagaatattttcttcattggatcatcgtgaggattaaatgaggtcttttatgtaaagcattttgctcagtaccaggaatattcattctgtcaccaaatatttattgattgtctactgtgcttatcggggaatgaagcagatgttggcccctgccttgcagtggctctgttctcaccagcatttaataaatggtgaccattcaaaggttttttggacatctttccctctgtttctcatgcatattcctataccatactgttcgattactattgctttataaaatgtttcaaacacttcattaaacttaatgttcctccatctccaattattcttcctattagggtctacttataagttacatgtgatttttaaaaaattttacttttgtcaaaatgatcaatggccatggtcacacatcaagtcaagtacccaggagcttttgctgagagcgcccccaccctgcctaatttatagccccatccctaatgccaggctctgggagatttggagatgaccagacacagttccagcctccatgttgcttccactctgggacagatgacaaatgtggagacagtctatgttataagagcaacagccagaggagatgcgagcatggcaggcctcctggaggaggtagcctctgagcagggtcttgcagcatgagctctgtgtgcagtgtggtggatggagtcctgcatttggggtcagtgcccaaactctaggcatggaagaacctttttttaaatcatccagtagtcaccaagggactctccccgtccctgtgctggggaggctctttggtgtaaccatcaacccaactgcctagatgggaagataggcctggtcagaggtgatctgcatgtggtagtgactgctttatttacttattcaacaaacatttattgagtaccttctctgtgccaggcactgttctaggagcttgggagacatcaaggtacagatagacaaagatccctgatccctgggagcctccattttagtaagaggaatctaatcataagcaatgaatatagtaaatatagagaatgctagaaggtaacagggacttcggaacaaagaccaagggaaggcggggcgagggcgcgtcgaaaatggtggtagaaagggtggtgggctctcagcccacaggggctggggctggcatctgagccagttatcaagcaaagcttctctgagtgaaggcggctgggtaaacagacatttcacatggttgtgggcgtgtggatttctacggcctccgtgagggcagctgggtgatgtctgtctaaattacaaatgcacatacagttggatccagcaattacacaaatgaatcctacagataaactcacacctatgctcaataacagatgcacaaaaatatttatgggagcaatattgggatagcagaaaactagaaacaatgcaactacccatgtgctcagctagttgaatatatgtgttatatccacactgtggaatactgggtacagaaaaaagaactatgttctgatataaaacattttctaagatgtgttgctaagagaaaaataaagtgcaaaactgtatagcatgctgtcatgaatagaataaatgactctaaaatgtgtatatgtagacagtctttgaaatgatataaaaaagctggtagacgttgcctctggagaggggcagtggatggctgggaggtggggtggtgttgctttttgtactcttggaattttgaaccatgtgaatatatcttaataaataaatggttcaattaaaataaaatggctgtttgctattggtgccccactcagaaccctttactgaccagcacagacatctcccacctgccttgagcacaagctgcctgcaaatggctcacagccagtatagttctctgaagacttgtgcttggtcaattgggggccaccttgctcagaaggttatgtctccccatgtcccctaagggcagcccatggcctatgacttccttacctgggctacaacagccaccccttgcttcgtgttggtactaactctgcatacaattcatgccccagagttccccatcagagcaggctgaaagaagtcttcaggcaagaccacatccttgcttagctgtacccactcctgtccggcttgcctcccacacttacaggttattcccaaggagtactttcttaatagccacatgcatctgaacccttgcctcaggctctccttctagggaaccctatctaagatacctagcttaagggaagggaactaactggaattaagtcctctccatattaatgtgttgagtcaagtgctctacagtgcaacatcctatgaggaggggcctacaggcaccatccccatttaacagatgaggaatctcagaagttgaggcaccaacttgagatcacacttcagggcaaagagggaggcgggggtcccagagcccacatctcttcccctgcacctgctcctgactttttaggcagatttacagggaaatcttcctgaatccagacttagcagcttctctgcacacaggatatagttcctgtacatggtctctaccatagtcctcactgcctgtagccaggcgtggccctaggggctgggatggcataggtgatgggccaaaaccactcaggatggcaggacccggagggcatgtctggggaaggctgtcatgatcccaaggctctggtgttcttggcctcccccagcacatgggattccagctctagctgatcacctgatataattttgatcaagggaggtgtttgcatacttccaaggatgggcagctcagcacatggcaaggcagcctgttgtgtctatggacaagttatagagggcagaaaggttttcctatttgcattgtaagtgtgattaacagcatgaacctgagcactcaagggccgtggaacaggggctgctccttccaccctagaggtagccctgctgaaatggggctttgggcatcctgggctctgatttgccttctgcagctcccacagtcccctgcagtcagtcccctgccctcctccggctgcttctcctggtgccttcctgagagcattttaatcagagctgcttctccctctctctctattctagtttgatggtgacagtgcctacgtggggatgagtgacggaaacccagagctcctgtcaaccagccaggtgggtgcctcatcctccctgaacgggtgtcttaagatttgggctggctggatctgagctgttcctgggtggaggtagggggtgcagaatggggccagcacagcccgctgctgtcttctctctgaatgatcaagaatagcaatagtctccttaaaaggtacaatcaaagtgggactatagtgttcgtaaattaactacctggctactgttggcttaaaatggattgggaacttgatgaaacttgaaatgtattgcccatactccccacgcttggggcagcttttcagcagcagtgagttgaggtgcctgctgctctctggtgccgcctgcctcttgccaccacacagcacccacggggacatgttctggtttggatgcacacatgcccttgcgtaggcatgcatggttctcctgcctgctgggagttgttgaaggccacaggggagggttgtggacagggcacaaggaaagagagcagaaggtcttactggtggcaaaggaagcagagtcattcctgggcaaggctgtctcgaaccccagcctggccctctggggggtcatagttgccagttggaatcagattttccactgagagcctggtctctgaaaattaatgtttctctcagctgggagcatcctcactatagactatgatgccacagagggtccttgctgcaggctgagggtccagggagggtctccctgcagaatgtgatgccagggtgggtcctcactgcaggctgggaccccagggagggttctcactctaggctgagatcagggagggtcctcactgcaggccaggaccctggggaatgtcatccctacagaaagtgatgcaagggtgggtcctcactgaaggctggggccccagggagggtcctcactgcaggcgggggccccagggagagtccttactgcaggccggaaccccagggagggtcctcatggcagaatgtgataccaggaagtattctcattacaggcatggcatcgtggaggatggttccctaaggcagtggtgcttgctgggtgggaccagctcgggacactgattggagagccaaggagggttatagctgctgagaaacttgggaagctggagggcaaccccggccctggagctgacctctaccctctgtctctgccattgtgggggctatggcagtccaagttgggtggcccctcagccatcaggctgggcacatattttccagatggggcaatagaagcctattaattcacaaatatttatgtccctattctgtgacaggtcccatggaggccatagatgagtaagacatgggcctgtggccctagggggcactactagtgaggaagatactgtagtctcagtggggcatggaagctctgctgcagggtgctgcgccccctcccctgccgctgcaggatcgctcatgccggggccaccataccatgcccctctctggcctgtccctgtgtgagcataatgctgctgctgcaaagctgcctttatattgcattgacatgcgccaacatgcaagactggtgggcaagactccaggccttggaagtggttattttggaagagtacactgatgtcatttaattgtacataatcaactgaagtctcatctcagcagaccagagttagccctgacatctcatctgagccttttcacaatgtttaaatagtatttttgttaacatattgagccctggttttcagaactatattatggtgaattctgttctggaacctactggaaagcattggcaatgtccttccaccaagaaggaaaagtgggactcagtggggctctgtgtctgctctaggcctcggcagaggagagcacagtcgtttggagaggagacttggtacaaataaatgtcaccctccccaaaccattaacagtcatatcctcaacaattcccccaacactttgcagcttgcaaagcctttttctcaatggttatttcagctaatcttcacaacagcctcgagaatgagtagacgttattgttcagtcaattttatagatgatgcaactgaagatcaaggatgttggctgattcaatcaaggtgactcagccagggagcactagagctggcattcaaacttgtgaagctcagactcggagctccacaagcctcccttgccttgtccactgacttgcctcagcctaaatgtcacttctgcagagagctctttgtgactgccaaacccacgttaggtcccctttccatgattctcattaaaatggcaccaggtctttttaattcatagtgacaaaaattcataatttttgtcacagtggtcatctacttaccttgtgatgacttagttaatgcctgatttccaccctaaactgtgaccaccatggggaaaggatctggtctctctggtccaatgctgtgtatcccagtggggcatagtgtctggaacaccgagagcactcagaaaatatttgtgtaatgagtgatggtagcccctgctcttctctgaacttcaatgtccctaacagtggaacaaggtggttggacttcctgagggtccttctaaatcttttatgctgtgacccagagggtctccctaacttaggactttatgaagaagatatcaaaattctctgagattaattaagtctagccagtggcatgagccaatcttaatgtgaacaaattttgcaattgcagttagatttcttatagtgtatccgttagtttttcctgcataacaaacacctcaaaacttagtggcttaaaacaacaaatgtttatctggttaatgattttgtgggtcagcagtttaactgagttcagttgggtggttcttctggccttgcttaggatcactttagcagcagcaatacattgccagatcagcagtgggctggttggtatgggaggctcacctgtgttccacatggtctctcagcttccagcaggctagctccaggttgttcacatggtaggagaagggttcccagagcagcaagagcagaaattgcaagatttcttgaggtccaggcttgaaataaacacacatctacttccaacacattctattggtcaaagccagtcacaggaccagcctagatcaaggaatggagaaatagcctctacctcttgatgggaaaggctgcaaaatattgtggcctttttacaaactaccacatgtaggaaacatatgggatatgattcatgatgattttgttgaaaaataacttagacttttctggtacctatagctccttgcagctcagtgggaccctactagcttctagacttgaatgatgaaagttctatatatttccttcctcttttccctggagtgcttcttgaactcacaacgcgagcgcgcgcgcacacacacacacacacacacatacacacatacacgtgaacaccctctcacaatgtgttgtctcatcaactgcaagaattgtattgtccaaattactggattaaggattgacatcaacatttgggtaaaatgaagccctcacagccactagaggattcagaggataaacactctaaatggcttaaaatatgttttataaatacagttaaatacaaggttcacccaatcagcaaatgtttattggacacctgttatatgcaaggctgtgaatatcagtgggaagccatttctggaaaacatttgcttccagaacatccaatcaatatatgtatatatttttgagatggagtctcactgtcacccaggctggagtgcagtagcttgatctcggctcactgcaacctccacctcctgggttcaagtgattctccagcctcagcctcccgagtagctgggattacaggtgcctgccaccacacccagctgatttgtgtgtgtgtgtatttttagttgagacagggtttcaccatgttggccaggctggtcttgaactcctgaccttaagtgatccgcccacctcggcctcccaaagtggtgggattacaggcgtgagtcactatgtctggcccagaacattcaaatcgtattacaaatttgttctttaatgtaacacttctcctgagatgccatcttctttacttagaaaccgcagctgagacagaggttcccctagggtatgtattagctgactgtgtccctttttgaaaactttcaccgccgctctacgggcttgaagtgtttttttttgcaaatacattctccattgtttggtttttgcaagactccacataaattttcccatagctgctttagcttctacaaatgatcacactccctctccctccttggaccttgggttacttttgtaccagacttgccggggtggcctgagaatgagatataattctcagatagggctgtgtccccatcagcagctccaggggggtagaggacctggtagaggtcagttctttcctgttgagagcagactctgtccaggagttacagaaatggatatttcctgatgatgtgacccagaaagagtctcctccttcctgggacgaggtgaggaggaaagggaagtgggcttgggactcagcagacctggattcaaattccagctcctccatgcctcagcatgggccagatttccttatgcaagtgatagcagcttcctatcaaatgggaggagtagcagcgtctgcctcctagagtgtcatgagaagtaaatgaggtgtgtgtgtattgtggattctgttgctgcctcaccagagtcctgctcatcattcagctgctgtgagtgttggctgctaactattcacagctactctttctttggaaaattggaactgtgaacccaggagaggatagaaggggaggtctagaaaccgatatccttatctcaaggagtgaccaactctgcaactcctcatgggctccagctaatccagccagactccagccaccaaggccaaatctttactcagctcctcccctgtcatgtcctgcctccctcccgcccttcttctaagagccctcttcaagtcactttcacaggcatccccatctcaggctgtacttcagaggaagctaaactaagagtatgtaaagaaccagagtcagaaaaactagctatgacttattattttttaccatatataatgctttggtcacacaagagcttctgttcacctcttgcgctcatttacaacttggtgtttttgtatgcattgtttcctctgatgggaatcccctagtgtttttcaaccaacaaatgcctatttgttccttcaggggcactgcaaatgtcacctcctcatcacagccttcctggctgtgtgtagagttttccactctcttagctctaaataccacttctgctaaagagctcacattttttacaggaattattgaaagaacttgtgtgtgtgtgtgtgtgtgtgtgtgtgtgtgtgtattagagtcagactgaatgacatgaatgacatcagatttgcagtcttaaaagctctcaatgacaagaatgaatacagggagaccaagttgagagggttggtaataggccaagtaaaggatcaagatctagattgtggcagaggggatggaaagaagtagatgcattggagataaagttagtgggtcttgacagtgatggacatagagggagagagaaacggaggggtaaaggatgactcctaggcttctaccatgagcccattttcaggcatggtggtaccattttctgagttggggaaaccctggggatttgcaggtttgatgatgccagacttggatgtgttatatttgagatgctcatccacatggagatgttcaagtagatagatgatggtacaaatcttgagctcataagagaagtaaatttggaaatcttcagcccatgatatcaaaaccttgggagtgaaggagatttatggagagagggaagaacgagaagagcagaggaccaatgactctgagatgttgagctccaacatttgaaggcaaagtagaggaggagaagactgtgaaatagattaagaaggagtggtttgagaagtaggaggagaacttggagtcttagaaaccacgggcagagtaattcaagaagagaggggatctaggtgaaaaggatgttggatccacagttccttaaaatttatcaaaggataaataaaatcctttgataatgggatcacatcaagttaaaacacttctgtacagcaaaggaaacaatcaacaaagtgaagagacagcccacagaatgggagaaagtatttgcaaactacctgatgagattagtaatcaggatatataaggagctcaaatgactctataggaaaaaaaatctcgtaatccaattaaaaaatgggccaaagatttgaatagacatttcttaaaagaagacctgcaatggcaaagaggcatatgaaaagttgctcaatatcactgacaatcagagaaatgcaaatcaaaactacaatgaaatgtgatctcacccagttaaaatggcttatattcaaaagacaggcaataacgaatgctggtgaggatatggagaaaagggaaccctcgtacactgttggtgggaatgtaaaatagtataactactgtggagaacagtttggaggttcctcaaaaaactaaaaatagagctaccatatgatccagcaatccaactgctgggtatataccccaaagaaaggaaatcagtatattgaagatatcggcacttccatgtttgttgcagcactgttcacaaagctaaaacttggaagaaacctaagtgtccatcaacagatgaatgggtaaagagaatgtggtatttatacacaatggagtattattcagccatacaaagagaatgagatccatttgcaacaacatggatggaactagagatcatcatgttaagtgaaataagccaggcacagaaagataaacattgcatgttctcacttatctgtggggtctaaaaatcaagacaatgaacccatggagatagggagtagaaggatggttaccagaggctgggaagggtagtggggcagaggggggacatggggatgattaatgtgtacaaaatagaatgaataagatttaatgtttgatagtacaacaaagtatagtcaataattgcgtattttaaaataactgaaagagtataattgggttgtttgtgacacaaggataaatgcttaagggaatggataacccattctccatgatgtaattattacttattgcatgcctgtatcaaaatgtctcatgtactctataaatatgtacacctatgtacacacaaaaattaaaaataaaaaatgatttgataaatgttaaatcaaacatttaaacatactcaagggaaccataaaggcaccagcaaaacaaaccttaaggtatactttacaagtttggtgtggggaaggcatttctactatttaaagcctcagaagaaaagacttaaaattggaccataaattaacataaaactaaattaatataaatataaaaattaacataaaatcaacatatgacttttgtatggccaaaccagcataagtaaagtcagtagacaaaagttgggcaagaatattttcaacttacaccatagttgaagaactaatcacccttatacatgaagacttgctagagatcagttcaaaaccctggtagaaaaaaaggaaggagatatgaaccaatagtttacagaaaaagaaatacaagtggctcttaagtatgtgaaaagtgctaagaatcattcataaatcataagacagccattttttaccaattggattgaccaaaatccaaaggtttgataacacactcggttggagttcttatggggaaacaggtactttatacatttctgtgggcagggtaaatggacaacatctatcaaaattgcaaatacattgacctttaacccagcaattcgtttttttggaaatatgccctacagatatatttgtacatatgagaaatgacatattcaagactattcattttgatattgctttactaaaaaagatgtaaaacagtacagtatgctaccatttatacaaaaaggtgataagaatgtatatttctaagtgcttgcatttgattaaataaccttggaaggatacatggacgctagagtggctttgcgcgttgtacatgcatgtacctctgtgtgtgtgtgcgtggtatgggaactgtgcaggtgctgggcagggatagaaaaagacttttcaccgtatctttttatgtttagggagttttaaaccatgggaatttattataactttagaaagttaaataaaatgtaagaagaaggagagagtcagttagctcaaacacttctgagggattgggtgagatgaaagttgaaatgtgtccagtcatcttagcgaaaaggaagtgactctgggcttcagtataagcagttttgatgtgcagggtcattgttctggtcccatgggcagattgagaagcgtgaggtgaggacatgtaaacagtaaatatagacaacttgtgtgagaaatttagctgtgcaggacaagggccagggccgagctcaatgagatgaagattccatagaagggattttcttttttttttttttttaaagaaaagtctttagaatatttagtcatcaatggaaagtgtcaggagagagggtgaagctctgggtttaggagggggaaaggctaagggatgctttcagatttcagagaaagtgggagggtctggatcctgctcagaggtggtggctctggccttagctgggagtgctgggtgtggaggacagcagagaaaaggagtgtggctttgtagatgggttggctgggagcagagggtgtctgcacctgaaggtgtcagtcttctcagagagttggtgggccaagagccaggggactgcgggtgagaggtggtggggaggtctggggtatttgctgtggggcatgggagaatgagctcccggtgcttgtgctgtggggcagacaggtgggttaatccagggcaagagatctgccaggcagttgcaccagaaggacacaacagcttttttttactcaaaagagactaatgtaaaggatcagggaatctaagctgcttttagagagaagacgggtcccagggcctggggtccagtgcagctaaagagctagtggggagcagctggatggcaaggacaccttattcagagtgggacgctggctggtgattttggaagtgagcaggccatggcattggcaggggcctggtatgcctggggagcagggagctgcatgggggagaagctcctgggaggtgaggagcccactgcccagcacagcatggtggctgagctgaagggccctggaaggatgccggggtagggtggatgggaaggtgggacccagaactgaaggctggaagaatgaggggctggatgctgatggggctgggtgtgatgggatttatagggacaatcagcaggggtctgaatggatggggcagtggagagggagaaggatgtcagttcctctgaaattcctgttgaggcaggaggcaagcagaaggcgtgttctaaggcaaggctgggaaatagggtactttgttcctagagtgagaatcccagtggctccagagctgtttgcaaggggaatgacactgcacaattgaacataaagattctggggacttacacatgaggtgctccctggggagctctcaggtctctggggtgcggtgtgtgccaccaaatgtgaacctgctggctgtgagcctcacagggcatgcgcagcacccagtgtggcccctggccccactgcccctgtagcatcccttcccgatgctccagcagaacgtgtgctggagtacagccatcatgtcatacaggccaacatcctcatgctacagaatgaggcttctcagtgcctcacaccacacctggcatgcaacagacacacaagaacttggagttcgtgattcttgctcttggttccagcaccaccatcatgtttgtgcagcaaccttccttcacagatccccaagtttgcctggtctgtttctctcaccacttggatcaagcatctccccactagggtggggagatggtaccatcaggaggccagaagacaaggtgctgttcagcttctagaggagaactcagacctgccgctccctgagcactgaggtccttgcggcctcaaagtcacagcctccttccagcagggggcagtgtcagatgcccagaatgggaaaaagagccaggagctctgagttcgaggctccgccctgctcttaggccttcacctgtgctggtatcactctgaacctgtttcctcatgtgaataatgagggtagatggtctgttttttccagcactaaatgatgataccgatgatcaataacatttgccctgcacctccttaggctcaggctcaggggctaaatgttttccatgggtggtctcatttcatcctcacattaactgtgtaggtgggcactattgctgtcccattttacagaggaggaaactgcagcacagagaggcagaggagggtgaggctcttcgaaacaaataaaaaccctccccagtaaatgtattggaggcaggcgaccctcctgctgctgttgaaatctaagatttctgtcttagtaattctggcctctgagtctgtgtacactgtaaagggcaaagatgacaaggcttttattgctttaattaaaacctgggtgaagagctcgcgattcatattaaaatgaaattgtgtttcacccgctgtggtgcggagaaggtaacagcggtgattactgctaagattacaaacaatcaaagagaaaaggccttttgcaagcatttcctattaaagccacaaacatcacactttaaaaataattatggttgtgttatcagaacatgattcatgagttctgaataaataccagaggccttaaaggaaactgtttcaagaccatagattttgttcaaatctgatgaaatttaatatcacttcacagttggagaataaaatacaaggagggggaaaaagcccatcctgtgtatatggagagaattgagtatatatgtcagattgaactaatgagctcttccccatcaaccctaaacacatactcagaaaaaatggcctagcttctcttattttcactgagagaaaactgccgaggaggagtgagtacttatatctcaccaatcttaattttacatcccaatggccaaaaatatatttattttaaagctcttgattcctgcctatgagacgtttaaatatttgagggcgcaggcatggagacattggggaatggatggggggaggactttggtctgcatttatggtgcctcccctgtcataaagatatttttcatacaatgcagtgaatgtttatggcatatagttttgtttccttccaactattatgagagaaattgaatcccaggaaatgttcactctctctaaatgggatggaaacaatgatgatgatgtgggaagtgcaggggcctgggggaggggatagcagtggggtggacacgtgatttcaaggattttcttaaaaacagcacccttccccctcccagccacctcccagccacctcgaacttagcatcccctgtaggacctgagtttttactggggagggtcagagaatgaagattttatacattgttcattgctgtgtgtgagctcactggtgaccaagaagtggaaatgaagccagacgtggggactttctcagaatgggactgggttcttatcttctggagggtcaggatcctggttccggcccctcctcagcctctctccctgtgtcccctcagactggtcatttgtcctctctgggctctggtttttgcatctgtgaatggggattggatgaatatctctgagggaccttccgggttgacttacagccaagggctcagcccccttcacccactgcctgagcgcccaggagggacaatggtctgtcccagaggtcttccccacctggctgagtcacaccaatgctgagagggccccgcaatgaggctggaagctgtgtgtcacatttcagcccaccaggcatgatgataaggagctgggttataaaggtaatgacatgagaaggcagaactgggctcaaatgataatcttgacacatgtggctggggaagcttggacaagttaaccaagttttctgagcttcaattttgtctttagaagttcctcagagtgatgcagaagtaaattaagtgtgtttatatccaaagtggttattctagtgcttggtacatagcaattggtagttagcctgaggtgctactaaaatccccattttatagatggaaaacattattttcagtaaggtaaaatgggacaggtacatactcagccccaagtagaggcccggaagccctggggtcaggccagtgatgcaggccttcgaagatgcatctgcttgcgaggtagcagggtctgtgccaacagccacccggtggcgccgagctcatagttgggagggtgcttagagcagagtgaggagctggggcgcatggctttaagaggagtgtgtgtccagctgggaaggatgagcaggcggtgagagtgacccatgcacttggagagagagatggggaaggagggctctgaggaaggttgctgtgcattgggaggtgggatcttcctcttataagtcccctgaagaaaaccttcagtgaagttctttgtaactgcccaaaggctttaaaagttagcacagtgtgacctttggctattgactgctgggatggccctcaagggtgggaagtttgtggctagtggttatacttgtgccatgtgtaaactgagcagttgtagttttattgttgccactagccttcataaacaatggttggcaattgcaacaggaaagatataatgggaagggacgaggaagccttttaaaatgtatgtatgtatgtatgtatgtatgtatgtgtgtattttttgagatggagtctcactctgtcacccaggctggagtacagtggtgtgatcttggctcactgcaacctccgcctcctgggttcaagtgattctcctgtctcagcctcccgagtagctgggattacaggcatgtgccatcatgcccagctaatttttgtatttttagtagaaatggggtttttccatgttggccaggctggtctcgaactcctgacctcaagtgatctgcccaccccagcctcccaaagtgctgggattacaggtgtgagccactgtgcccggctttaaaatttattaacatggtatactcccaccgaaacggagaatatgtaaaagactaagttgagaaggatctggaggaaccagtaccctcactcactgctgtgtaaattggtaccaccatagatgccattttgcagtatctaaagctgaatatatgtctctatgactcagtaattcaactccacaaatgccttcgtatgttcaggccaggcgtggtggctcatgcctgtaatcctagcactttgggagtctgaggtgggaggatcgcttgagcccaggagttcaagaccagcctgagcaatttagtgagacccctgttttaaaaaattaaataattagccaggtgtgctggtacatacctgtagtcccagctactcgagaggctaaggtgggacgatcacttgagccctggaggttgaggctgcaatgagccatgtttgctccattgcactctagccttggtgacagagtgagactgtttcttaaaaaaaagtttataggagtgtttttcattaaagctcaaaactgaaaacaatccaaatgcccatcaagagtagactggatacatgattctgaaatattcttacacagtggaatactatgcagcaatgagaatgaatgatgtgtaaccacatgccatcaagcagatgagtctcacaaacacgttgagtgaaagaaaccagacaacaagacagaacattctagacaatgccatttacatacagcacatgaacaggcaaaactaatcaatggagatagaatgtgaattgcagttaccctagaggggggtggggagtgactataggggctttgaggggcttcagaggtgctgggaaggttttctcccttcctttgagtgctgtttacacaaatctgttcactttatgaaaattcattgagctgtacatttatgatttgtgcacttttctgttgtattctatgcttcaataaggtgtaaaaaaagaaagatcaaggcattgtatttttacaagtatctcaatttttagagacagggcaggcagggaagggaacctagccaggtttggtcatttgtatcttgtgttaatccggtcaccagggtagtaaattcccactgagagcatggatgggcgagccttttaccgcttgaacaatgtatttaacttcctgggagggaaagaattattttagcctcataatggatgatgagctgtgaaattgctctggctgtggcttgccccagggaagcaggtggcacgggcttccccagatctgctcagctctgcaggctctggccttccacttctatttccttgtggacagagttttaggaaatgtttgaaatatcaacatctttttttttttttttttttttttttggagacagtgtctcactctgtcgccaggctggagtgcagtatcacaatcttggctcactgcaacctccacctccccggttcaagtgagtctcctgcctcagcctcctgagtagcggggattacaggcacatgctaccacacccagctaatttttgtatttttattagagacggggctttaccatgttggccaagatggtcttgatctcttgacctcgtgatctgcccgcctcggcctcccaaagtgctgggattacaggcgtgagccaccgcacctggccgaaacatcaacacttaaagcacatgcatatgtgtgtgtgtgtatgtgtggtttttgtgatgctgtgctgtggtgccagaaaatcttgttaatggaatatgtgaagatgtctaagtttctctgggcacagacaacacacatgcttgtgtacagacacattcatgcacaaatataagcaaatacaaacacaacttgtaggcatgctcagtgtatggaaaggcacattgagcattgctgtgtgctcctgggcaagttactcaatctctcattgcctcagtttctgcagtgaaatggagataataaatcacctgactcttgggctagtgtgagcaatactctcacatgtgcacaagcacacacaaatgagattttagtttccgtttatttgcttaatggctgctttcctcctagactgtgggtttcgtgggggcagggacctggcacagggtaggagtggagttggtatctggtgagctaatatctggtgatgaacaactctcacaagcctactggtacacatgctgtttagacacattcacaagcacatctgacacacttattcacaggtgtaggcacatacagggatatacacacacacactcaaatgtgtccagactcagaacttaggagggtggatttatctgcagtttggggactctggactagaagtgagaacactgggttttggttgtggctccaggtaactctaatttattatgtgaccttgagtaagtctctcttctcagaggtcaaggactcccagctgcatgtgatggactggaatttgaaccacagttagtctgagtcaaagtgcttttaatgattcaggccgtgctatccccagtgtggtcatggacatgcagcatcccctggagcttgttaggcatgcagcatctcagtccccacccagaatctgatttagagtctcctaaatcagaatcttcattttaacagatccctacttgatttgtgtgcacattacagattgagaagtgctggcctagtgtactttgccttccccaagcactgcaagcaattagcccatgctgagggggttcataagctggtggggcacaggcacatgcctaccctgaggagcagttagagaatgggagaggaggcagtcgggagctgcctataaagacagaatcaacatggaagctcagcatcacacatgcgggagcccagtcccttctatttataaagaagcagaatcacacagtcgttaagagtgccaattcatgagctaggctttttaattttaaaaacagcatatattagggctaggcacagtggctcatgcctgtaatcctagcactttgggaggcccagacaggtgggtcacttgaggtcaggagttcgagaccagcctggccaacatggagaaactccatctctactaaaaatacaaaaattagctgggcatggtggcatgtgtctgtaatcccagctactcaggaggctgaggctggagaatcacttgaatccgggaggtggaggttacagtgaggcgagatcacgccactgaactccagcctgggcaacagagcaagactctgtctcagaaaaaaaaaaaaaaaacccacccagcatatattaatcatctcatagttactgcatgccaggaatcaagtgtggcttcatgtggtgcctctggcttaagatctcttggaggctgtgctcaatgtgatactcaaggctgtggtctcatctgatggcttgactgaagggggatttacttccaagttccctctattggttgttggccggattcagttcccctgaactgaaccattgagttggaatcatggctccatcccttcttaccagttgtgtggctttatgcaagcttcccatctctgtggctcctctgtgaaatgattataataataacacctgcctcatagagttgttgtgaagattaacaaattcatgtatgaaaagtacataggataaggatacctctacacatggtaagtgctatataaatggtttctgctattttttgaaaaaagctatagaaaagcaggtcagaacaatgtgactatgggggctgagctatatattttttaaaaattttactggtaactccgtaggttgcagcacaagcctagttcagagtggatgcttactacattttaggggagtggatgagctctgggtggcagccccctgatgggatgtttggggcatagttacaggagcacggggtccaggctgcaagaggagcaggccttgctctattctgcccagatcactgggccccatttgtggtgccaccacctgggaaggcagtagggtattgtggaagtcctctcaatgtcacctgggaggacaatggcatgagcagaggggccagcacacctaggtgataccacagaatgcagtgtttgggggctacagtgagttcactgtggctagtatcaggcaaggttgcaggacttggtccaggaggccttggatgccaagcagaggccgggaccctgttctgaagggtctgagcagggcagtgtccatggagcagtgtgctctaggggacttcactgctcagcctggtgtcctgggatctcggggcactcatgaggaccattctcagagaacttaagtgccttcatccacaggcagctggcgtgtggcacatttttaggcaatgctacttctgtcattttcagaaggtagaaatgggaaagaaaaaaaaagctgcaaatagacatcatttttccagaagcttattttaagacagaaacaactagagagcctactcatcatttttgctgcttttaaaatcagcactgccttgtgtgtgcctgggtacctgcatacaaggagcacaggcatgaattgaatttgatttttaaaatcccttgatccaattgcctctttttacagttggtgtaactgaggcccagaaaggggtcagtgatttgtccaaggtcacacagcctgtcagaggtaggggctcagatcttcatgagaagatgctaagataaggacaaggaaccaggagaccccgatgggccaagttagaatgatttcatgctgaacagcgtcactgagcgggctgcttcagacctttgctgacttcttagagcttgcaggaaagatggtgcagcactgagcccaatgccatagcagaccattaggatgttcattcattcattcactccaaaacatatttactaagcacctactgtgcgtcaggcagtggtgtaggtgctgagacgaaactgtgaacaaagcagtcaaacactcctagtccttactcgttcatgcatccttttattcagtaaatgtttattgagggcctactatgtgcaaggtactatccttggcccttggaatatatcagtgaccaaatggtggaatttatatcctagtgaaggggacaggcaataatcattattattattattattattattattattattattattattattttgagttggagtcttgctctgtcatccaggctggagtgcagtggtacaatctcagctcactgcaacctccacctcccaggttcaagcaattctgctgcttcagcctcctgagtagctgggattacaggcatacaccactatgcccggatcatttttgtatttttagtacagatggggtttcaccatgttggcaacgctggtcttgaactcctgacctcaggtggtctggcctcccaaagtgctaggattacagacgtgagccactgcagccagccataatcattattttaaagaagtaaagtatactgtatgtttgcaggtaaaagttctgtggggaaactgagcaggtaggggagctgggtgtgccagcaggagctgcacttgcaaacagggtggccagggaaggcgctgctgagaaagtgacatttgagcaacgacttgaaggggcgagggagttgagatctgggaaaggacattgcagtagagggaacagccagcaccaaggccccgcagtgggagtgtgcctggcatgtttgaggaacgtggctggagtggaggcagtgaggtggaagaactgggagacttatctgatcgacggctgggatggtcaagagcagctcccaaccacgtgtggcatgggcagaggtaagtgacccaggacagcatcaggagtgatcgtgtaggagcgatcgtgtaggagccaggatacccctacctcccttgtaaggcctcccagcattgacatgagggcagggcacgtgcatggggtgtggcatcccttgcagtgatttaaagggaagtctcagcatctcgcaatgtcttggagccaaaggagctcccattttgaggccactgtgggaaactcatgtggcgtaaggaaggatcatagccttcagatcgagccaggcccatatctgaaaaaatgtcgtggttgaatgtcttagtaataccagcatggagaagccattttctaagcatgatgtgaaagccagaaatcatacattaatacatttaatgttttaacataaatgtaaagcccttgatatggcaaaagttataaataagatcaagtgacaaattgggagtaatatttgtagcatgtaacatgcaaacacatagaataaaacaatagaaaaatggcagaggtaatgctggttttagaacatgaaacacattcgtgtagggtttacaaaaaaaaaaaaaaaaagaaaaaatggtggagggccagatttggtccacggcctgtgatttgctgatccgaactgatttaggaatgttgacatgtccaaaactgagctcgtggtcctccttatacccaccaagcatgttttcccctcagtattcctccaccagtggctcgagatgggaacctgggagtgatgttcgagtccccgctgaatgaggaaggcacgtggcatgtcagacaccatccaggctggccatagcgatgagggggtgtcataggaggtgagactggaaggagactgggccggatcatgcaggactttgcaggctacagagagggtttcacacacactgtatcctgagcgtagaggacatcagctaatgggagtatcaccatcagttttgtgtgtggaacctctaccctggctgctatggagaacaatttggaaggaaagagattagaagttaggagatcattgaggaggtgattacagcagtccttgtgggaggtgatgaccgcttggactaggatggttgctctgcagatggattgtggtgggaagatttgagatacatggggaggtggggctgacaggactttgtgattgattggagatggggatgagagagggaggaattgaacatctctcccaggtacccagcttgagccaccggtagaggaatactgagggggaaatggacttggtgggtacaaggatgaccacaagctcagttctggacgtgtcaaagaaatcatggcccttggaccaaatctgaccctccacctgttttgtgtaaataaagctttactggaacatgggatcctcctaagtttaaatattgcctgtggctactttcatgctatagcaatagagttgaatagttctgacagagaccatatgactcacaaagccaaaaatacatattatctgcagaaaaagtttgctgggcttttgtgtaggacatccaagggaagtaaagtatcaaagaggcagttggatatgtagctataaaaatgtaatttgaggctgggcacagtagctcacgcgtgtaatcccagcacttcggaatggaaagcagggaggattgcttgaggccaggagtttgagaccagtctgggcaatatagcaagacccggtctctacaaaaaaataaaaaatagtaggacatggtggcacacgcctgtagtcccagctccttgggtgtctcaggtggaagatcgcttgaatccgggagattgaggctgcagtgagctgtgatcatgccactgtgctccagcctgggcaacagagcaagaccctgtctcgaaaaagaaaattcaattaaaaaaacaaaaacagtttggcacggtggctcatgcctatactcccagcactttgggaggccaaggtgggtagatcgcttgagctcaggagtttgagaccagcctgggcagcatggcaaaaacccatctctacaaaaaaaattaaccaggtgtgttggctcgtgcctgtagtcccagctattcaggaggctgaggtgggaggatagcttgagcccaggagtcagaggctgcagtgagccaagatcatgctattgcactctagcctgggtgacagagccagaccctgtctccaaaaaaaaaaaaaaagactaccacttattggaaaactgagcttccttatctgtaaaatggggccagtgcctgcttcaggctgcctcttctcattcagatgctgttgcccacaagttatccccagccttgcgacttttgctacttaagttctgctgggactgctgcttcctaaagaaaaggacccccaaacccacccaccaatcatgtatctttccagagcctccccgtccctgcccggtgaatcacccaggatgctgctgaaaccttagcttgagtcagattgtgtcctgagcgagaacacatggggattatcatgtttgttcccagatagggttttagtcaacaaaactcctgtctaatgtgactgcctgtcattgtcccactatgatgcctctgtctgccctgatccaagcatttcggggtcaggaacagccacagagcagccgtggctggcagcgtggcacactgccggtgggagggtgttagatgcactcctgtgtgagtggcctggctcggcttggaggttctgcctgtagataaaggctgagaaaagatattacattcccctcccccacctcctccagaatccacgcttcattttaccggtatggcttttctctcctgtttggcttatatatggtatggacttttagttttttattttttaagaagcatttttagtccaggaaaatgacaggccaagcaaaaggcataattgtcctgattttcagaagtgctacaatactccagatctgatgtatggtgagactcgaatcagaaagattctattaaacatgtctggggtgggtgacataggggtattatctgagatgattaatttgactcggtcattatggacacagacaagcctgacaaaattgcatttcattccccgcagaattcataaaatcactatacccgtgataagaagttacagtgctaggagctcagctccagttgttggggtttggagttttgataagatgtcattttctgttgtgaaaacagagttgagaaacactgaatcgcactacagtcttttagcagagatggctttttttaaacttttattttaggttcaggggtacgtgtgaaggtttgttatataggtaagcttgtgtcgtggggatttgatgtacggattattttgtcacccaggtattcagcctagtacccattagttattttttctgctcctctccctcctcccaccctcaagtagaacccagtgtctgtttttccttttcttgtgttgatgagttcttatcacttagctctcacttgtgagtgagaacatgtggtatttgcttttctgttcctgcattagtttactaaggataatggcctccagctccatccatgttcctacagaagacatgatgtcattcttttttatgactgcatagtattccatggtgtatatgtaccacatacaacattttctttatccaatctgtccttgatggtcattcaggttgattccatgtttgttgtgaatagtcctgcaatgaacatttgtgtacacatgtctttatggaagaatgatttatattcttctgggtatatatccagtaatgggattgctgggttgaatggtagttctgctttttgttctttgagtgattgctatattgctttccacaatggttgaactaatttacactcctaccaacagtgtaagtgttaccttttctctgcaaccttgccaggatctgttattttttggctttttcataatagctattctgactggtgtgagatggtatctcattatggttttgatttgcatttctctaatgatcggtgatgttgtagctgagatgttcttgctggtgcgggttttacttgttaaaatggcaagatggtagggcgaccatataatttactggccaaaccaggacactgtttagagtgaaataaaacattattaacgtgacactggaacaagaggcgtggagcaggcctgccctggcctagccaggactcgtgtgtgttgggaggagcttgaacagtggcagagcaaagctttggctactggtaggcagggcttcttgtcctcattttcataaatgctacccatatgactttggataagtcatttttcccttttgaacctcagtttcctcatctgtaaaatggaaatgccattttctacttgttctgcatatcatccgagggctttttttttcttgcttgggtgtgtgtgtgtgggatttatgctgacttcctgttaatgtgttttcccatctgtttcctggtataattctctcagctcttaggtggggttttgtagacaaggaaactgagtagtaggcagtttggataaattgccagaagccctcagcaagtaagattccccatgtcagtgtaactccaaagccagagctctttctgcagatcaacaatgtaactctcaatacatgagagttacagcacctcatgtttccatgtatttcaaatattcctcccaacaaagctggaaggttgttggaatacataatcaggattcaactctggggacacaagttgggttctcccaagaatcatttctcaccatgcatcaccagggagtgaatgccacttctccttttatgctatactccaactctcaacaagctctttggaaaaaggtcaaatcacctgctactccctcagtgaatcttcacctctttcttatacagcattgtggtgggaaatggagatcgatagtcaaaatggcagcctgagaactttcatgtaagcactaactgggataaagtagaaagccatcactaataaaaggaacacttcaacaagcagatacaataacaactgatttgtaaatacctaacaacatagctttgaaatatatgaagcaatacagcaggttgataaaatcacaatcacagtggaaatttttaacacatttctctcagaaaccaaagggtcaagcagaaaaagaaaagtaattgttgtttggaagatttaaatgatagaattaacaagctgaaaattataaatattgatcaaaattagcctgatactgtatcaaaggaattctcaatggcttttaaagaattaatatatttttcattcccttttgggtatctttttcttttttcatgtcagtggttccttattttattagccttttcaaaaaaacaatctcttccttgtatttcttatctaaaatttgttttctattttatttttctcctacagactttcggtttattttgttattctatttctaccatcttgagttgagtgctgagtttgtctttcttgtcttctaataaattcattttgataaaagtataatttttcattgtccatctctcataagttttgtcaggtagtgttctcatcatttcagttgtgatttcctttttaacacagaagttacttagatgattgctcttaaagtgtttaagtatgtaggaggatttccctccctccatttttttttctgctcgtttgtttttgttaataactaggttggtgcatgtactagtctgttctcacattgctagaaaactacctgagactgggtagtttataaagaaaagaggtttaattgattcacagttctgcaggctctataggaggcatggctagggaggcctcaggaaacttacaatcatggtagaagggtgaaagggaagcaagcacatattcacatggcagcaggagacagggagatggggaaagggctacacactttcaaacaacccgatcttgtgagaacttacttactgtcacgagaacagcaagggggaaatcagcccccatgatccaatcaccttccaccaggcccctgcctgaactctgagaattacaatttgacatgagatttgggtggggatgcaaagccaaagcctatcagtgtagttaggtcttagaatttgatctatctaatttctaccttttgaagagtttgagattctctttgtagtttacctggttatattttgtaagtgttctatggacatttgaaaggaataaatcaaaagagtgaattgcgtcattcagatcctcaatcctcactcatttctatctgactgatttgcccattttatttatggttttatactaacagttttttacattttatatttctgtggttttatcaatttacataaaaatttgtcatttcttcttagtagatttatatcatttattgacttaagtgttccttttgatattttttagtgcttttttgccctgatttgtacttaatttgtaattaattttgccactctgctttttgttggcctgatacatctatctatctatctatctatctatctatctatctatctatctatctatttattttaagatggagtctcattctgttactcaggatggagggcagtggcacaatctcagctcactgcaacccctgcttcccgggttcaagggattctcctgtctcagcctcctgagtagctgggattacaggcactcgccaccatgtccagctaatttttgtatttttagtagagatggagtttcaccatattggccaggctcatcttggactcctgacctgaggtgatctacccaccttggcctctcaaagttctcggattacaggcgtgcgccaccatgctcggctggtgtctatttatttttatcttacaggtcattttattttaggcatgtctattataaaccatatgctgtatgtattttaataaaaatattttgtcttttaataaagcaattgaaatcattcgtattatgttatgaatatttagtcttaatgctgccattttatgaatattctttattatgtttgatagttcactcctgttttctttgcagatttttctagattgataaagttctgttttcttctactttctttggttcttccaatggtgtaaaatttttgcttttccttaaaattataacaaatatttaataaattaattcatcaaagtttcagggcaagatcagtatggaaaaatcactggtgtttctgtaaaccaacaatgaacaacccataaaggaaactaaaaaaaaattccatatataataacatctaagagaataaaatatgtaggaataaatttaaccaggaaggggaaaaactcctaaactgaaaactacacaacattgtcaaaagaaattaaagatctaaataaattgaaagatatccatgtctgtggattggaagacttaataatgttaagatggcaatactatctgagcgtctacagattcaatgcaatctttatcaaatttccactggtcttttttgcagaaatgaaaaatctgatcctcaaattcatatggaattgccagggggcctgaatagcaccagtaatcttgaaaaataacaggctggaggactcacacttcccaatttccataaagcaacagtagtcaaaacaatgtggtactggcataaggatagacatatagaccaatggaatagaattgagagtgtagaaataaaccaatacatctatggccagttgattttatataggggtgtcaagaccattcagtggggaaagaacagcaggctgtgtggatattgagagcagagtattctaaaggaagggaacagccattgcaaagactctggggcagaaacgtgcctggagtagctggagtggtatgaacaaggggaataggagatgatgacgtcagagaggtaaaaaaggacgtgggactggggagagcaagactacatagcatggggccgttgttccttatctgagtgagaaggagagctctagagggttgtgagcagagcttatattttagcaggataattctggccctggggtgagaatggaccttagcaaaggtggaggcagggaggccaagaggccagggaggagactgctgcagtcatccagggcaaagagggtgatggctcaaggtggagctgatggtatttttggacacatttcgtgtaggatgtgagaggaagagaggggtcaagggtgacaccttggtttctggcctgagcaaccagaaggatggagtggccattagctgaggtggagaagactgtgggaggggtaggttctctcttaaatgtgttaagttgtttgaggtatcaattaacatccaaagggaaggacaaataacagtgggctatatgagtcagcatttcaggggaaggtctggctcggtggtaagaactggagctcagcagcatacagatggtccataatgccatgagtctggatgagagcaccagggagtgagtgtgtttagaggagggtataagatctgagctctgggaatgtcatcatcaatagattaaggagaagaatgggaaccaacaaaggacatacagaatggcctgtgatgttggccatggacagaagaaatggcctgtgatgttgaaggaccaatatctctggtgtcccagaagccaagtgaagaagtttgttcccagggaggaggatgaactaattatatcaaattccactgataaggtcaagatgaaggccagatgaagactgagcattggccactggatttaggaagatggaggtcattgatgaccttcccaagcagttttggtggaagtgggatgaaaacatgattggagtgggtttaagaaagaacgagtggaaatgaagaggtaactctttgcagatttcctgtaagattttactaatatttttaactggcaaagctcttacgacttagcatctctttctatattttcatgaggatgccagtggtagagagaaaattaggcaccatggaacggccaattctactgtaggaaaatgctgggtttggagtcacaagaccagggtctgaatcacaaccaggacctactagctatgtgacacctctactctctaagctccatgtccctcatctgcaaaatgaagataataatcacttctctacagaacacatatgaactaaatggagaaggtacatggacatgctgggctcagtgcctggcacatagtaggtactcaggacaagttgtttagtgttcagtgtcatgcatgtaggatttgattgcattcagaagaggcatgttcatgtttgcgtgcttagttatttttaagtgtgctaattgcctctttaagtgaattgtcataattgtgtgattccaatattttgatacagcatatgcttattttttcaaaaggcttctggtcaattgggccggttccagtggattgaagttttgttttttgactgaaaggaatggacttgagcagtcagttagcattcactgggcaccttctctgtgccagcacctgctctgtgccagcacctattttaacagtgctgagggacagggagggaggtgtcggtcaaaacacatgaacagcaggtggctgaggggcgtgtagtatgctgggaaggagagctgtggtttgaaactagagcctgggacattcccccatttcccgtgcccatttattgtgttgtaatgagtcattactgtgcactgtgctaggcactgaggacaagagagttaaaggacttccccaaagacacagaataagtaaacagcagctcactggctcaggatcctcatttatgagtgttcctaactcacacagcacaggtctgagcaccacagggtgatgtgtgtcttcagcctgaccaccaagatgggctgggggccgattgcctttaggtggcaataagccacagatatcatatcaccccagaaagtagagtcccactgccagctttccagttcagagtcgccacctccaggaagccttcccaacccctctgcccattctaaggcaagactctactcctttgatgctccctatacaattccttgtgtgtgtcccccatagtatcataatattcatgaccacctgcaaccattttgactctacttaccttttgcttgtgtccctgtcccccatatcccagtgtgctactgtttgcttattctgtgtccttggggaagtccccaccatctctgaaactccagatgagggcagcaaggatagcaataactaacgctgacatcactcactgtgtgctcaacattgccctgagaaacttacatgttattgattcatttattctttatagcagccctgtagatacatactgtcattacctgctttctcacacatgaggaaactgaggcacagagagggtgttttagtctgttttgcattgctataaaggaatacttgagactagatcttttacaaagaaaagaggtttaattggctcatggttctgcaggctgtatcagcatggcacccacatctgctcagcttttgatgaggcctcaggaagcttttactcctgggagaaggtgaaggggggagcaggcatgtcacacggcaggagaatgagagagagagaggggaagaggtgccagtctctttaaacaaccagctcttgcatgaatgaatagagcaaaaactcactcattaccacagggagggtcccaagccactactgaaagatctgccccatgacccaaacacttttggctcagccccacctccaacagtgggtcacttttcaacatgagatttggaggggacaaatatccaaactgtatcagagggtaagtaatgcacccagagtcacacacaggcagtaagtggcagagccaggatgcaaacccaagctgcctggctcctaaccactgcactgcactgcctcctgcgtgatagggacagtagttcccagctccagggcaatcatgaaggttgagtgagatgcatgtttatggtgtccaccccaggacctggctgtacattcaactttttttttttttttttttttaagatgaggtctccctctgtcacccaggctggagtgcagtggcacaatcacagctcacttcagccttgacatcctgggctcaaatgatcctccacctcagcccccgaagtagctgggactacaggtgcatggccacacacccagtgaatttttgtatttttttttgtagagatggggtttcaccatgttgcccagagtggtctcaaactcctgggctcaagcgatcctcccgtcttggcctcccaaagtgctgggattataggccaactcattgtttctgagctcttactttgtgttccaactctgtgccaggtcctgactgaggcattggggatatagggagcaaaactcatgttaaatatcagacaaataatcacacaagaagtcagttaactacttataacgatgagtgcttccaaggaaaaattctgggcaatcttggggtgtgaaatggggtttgatctaccctggagtatcagggaagacatttaaacaaaacctattgtggagagatgagtaggaactaaccacgggagggacagtgtgtggcaggcggagtgcagcagagggaactgtgtaggggagagcccagaggcaggagaggtcactgtggttagaggggtggtggggccaggccatacaaggacttccagggctggatctgggactgtggacttcatcctgaaggcagtggggagctcatcatttgatgtgggattgacatcgtgtgatgatcatcttgacagagaccagtctggctacagaaagagaatagagcagcccgagtggccaatgaaaacggctggtaagaggtggtggtggcctggactaggatagtggcagtgggaaagaaacagattttaaagatattttggagacatttcattggatttgagagatgtcagggggtgagtcccaggttcgtggttctatgaacgggatggaaggtagtgtcacttgctgagatgtagaggacacagggacacggcaggggaaggggtattatgatcaacaaacgagaacattgactgggcatcgagaggctccgccctggagctcagatgagtgaccaaggctggaggggtaaatgtggcacttagatgagaatcgaaacccagactggttgaggtccacctggggaggcaatgtagggcaggaagagaggggagttcaggacagcctgaggaaccctagatgagaacagagaaggagaaggtgaagcaggaaggtggacatggtcatggcctgttcccagatgactgtttgcccatctatgagatcatcccactgcagccctgcagagggaggaaatgagcaaggggccatgtgggctctgggtcccagtggtgggtcccagggtggcaaggcacttaccctctcagtctgttctacgactgtaaagggtagtctagggctctcccccatggaatttaggtatcttgtgctttctgctgttgccacaggctgtacacacacccagctatccccgctgctcagtaacttcatccagcagacactcagggaattggccaccaccaaccaggtcctgtgccaggctcagtgaccttcactattttaacacacgcacttaaacaatacaatgatgctagaaggtgttatttcttacatgctattgtggtttaggtttccccccacctctatgcatatttcttgattgatttaagatttagcactgtaggtaacaatatatgttacgtagttatatagtctgaaagagctagaaggaagatattgaatgttcccaacacaaatgataaatgttcaagatgctggatatgccaattaccctgatctgatcgttatgcattatttgtatcaaaacatcactgtgtaccccataagtaagtaccattattttatgtccatttaaaaaatgaaagaaaaagtgtagaaaacatttacctttatatttaccaatgcctttgatatgcttcctctgttctggaacattctcaactattatctcctcagttctcccctgacctattattctctcactcttctccttccagaatgctgattgaacaggcatccattagacactcttactctgtccgctgtgcacataaactctctttcatatttcctttttgaccgtctatgccaaactctggataatttcttcagagtcatcttccagttgacacacctcttttctgctaggtctaatctgttccagagtgtagaaatggaagaatgactcctcaagctaaagtaaccttgttactaaaaccccaacaaagacagtatgagacaggaaaattataggccagtcacacttgtgaacctgatacaaaagtcctaaacaaaacatcagccaacaaaacccaacaatctatagaaagaataatatgtcatgaccaaatagggtttattccaggaatgcaagattgatctaccattagaaaaccaaattacatgtttactatgctaactgaattaaaggagaaaggtcatttgagcctgtcagtggatgcagggggaaagaatttgatacaattgaaaagccatgcatgattttaataaagccacacactttgacccaccaggaggtccctcagcttgcttaagaatacctcaaagaacctgtggcaaatggcatcctttgtggtgaaatattgagctctttaagataaggaaaaaggcccggatgtctgttctcaccatttctattcagcgttgtcctggaggttcctggacagtttggcgaggtgggaaaaaaaaaacaaggaaggactggaaaggaaggtgcacaggtgactcctggtttctagcttgcactcctgcaaggatgtttgtgccatttaccaagatgagaaagactgagaagccttgggctgagtgttgggagcacaagagaaaatggcctggcttccctggaaagatcaccaggcctggaatcaggatacttcagctccattcccaactcttcccccagccatggatggactgctttcctccctggacctgagtctctatctgtgaaatgggtgggcaggaaagatggatccaaggtggactgtgatggccagatctggtgggaaaccagagaggaacagggggagccggcccccattctccaggagggcaggcttctgtgtgcagagcctctggtgggaggaaacatctgtttggggatagggcaggagtctgaccgagttagggcaccgtcttgaccctctgccttgcagaaacatcatcccttctctcctttgccaaggggttgctatcgttattattgttgctgttattggtgctgttgggtatgttctgcggttgtaaggcactgacccccaccgacatgtctttttgatgttttagacctacaacggccagagcgagaacaacgaagactatgagatccccccgataacacctcccaacctcccggagccatccctcctgcacctgggggaccacgaagccagctaccactcgctgtgccacggcctcacccccaacggtctgctccctgcctactcctatcaggccatggacctcccagccatcatggtgtccaacatgctagcacaggacagccacctgctgtcgggccagctgcccacggtgagtccctatcgcctgctgcagttcctgctgatgacagcagggagggggttgagagggaagcagaagaatgttgatgctttgataagaactctctgctcatgggcagggtctgggtttacctggttgcttggagttggtaatcccatgctgggattacctggtagcatgggagtctgtgggacacggtgggtgggcatggagagaaatctaatatcagcacactgcttccttctggagctctgcgtacagtatctcggtattggtttgcattatttgttaatagtataatctcatttttattttttaacagttttattgaggtataatttatattccatacaattcacccatttaaagtatactacttaatgacttttcatatattgacagagttgtgtgaccattaacacgattgattttagaacatttcatcaccccataaagaaacactagctaggcacagtgttgtgtacctataatctcagctacttgggaggctaaatgggaggatcgcttgagcccaggagtcctgggctgtagtgccctatgcaaatcagttggctgcactagctttggcatcagtatggtgacctcctgggagaggggaaccactaggttgcttaaggaggggtaaactggccacggtcggaaacagagcaggtcaaaactcccatgctaaccagtagtgggattgtgcctgtgaaaaggcactgcactccgggcatcatggcaagaccctatcacgaaaagaaaagaaaaatgctctgttgccgggcatggtggctcacgcctataaccccagcactttgggagactgaggcaggaggatcacttgagtctaggagttcaagaccagccttggcaacatagcaagaccccgtctctacaaaacaaattagccaggtgtggtggcatgtacctgtagtcctagctacttaggaggctgaggtgggaggatcactcaagcccgggaggtcaaggctgtggtgacagagtgagaccctttctcaaaaaaacaacaggaagaaacatcatatttttggccatcactcccaatccaccccctgaaatcttcagccctaggcaaccactaattgactttctgtctctataaatttgtctgttctggacatttcatagaaatggagtcatataattaaaaaaaaattgtatcttgcttaagctgccagagaagagggtgattactgagttaaagttcatgggataggtaaaaatgtagcaggcagacaaaggcaagaaagaacctttcccaggttgggggaatatcaggtacaaaaggaggtggcaagggtgctcgtgccatgcttgggaatagcatgtggttcatgctttttattgggctggagaggaaggacctggagccaaggagagagaggagatgaaagagctcagcagggcctggatcataagggtcctgaatcccattctaaggagatatatatccttagaatggctgatttgaggccaggcatggtggctcacagctctaatcccagcactttgggaggctgaggcgggggatcacttgaggccaggagttcaagaccatcctggtcaacatggtgaaattctgtctctactaaaaatacaaaaattagccaggcatagtggcacacacctgtaataccagctactcagaaggttgaggcacgagaattgcttgaacctgggaggtaaaggttgcagtaagctgagatggtgccactgcactccagcctgggccacgcagcaagaccctgtctcaaaaaaaaaaaaataataatggctgatctgaaccatcaaaatctatagaaaaatggtagaacagtagagcattttttttataccacagaaaaatctccttaagggaattctattgcttcttctgaacaactgtgacttgtgtttatttttgctttttttcccttcacatttaatattacgtactagtcatgactcttacgttcatttttaagtgacagggaccaaactcaaacttatacaaaagagtatgaaatatccagggggtggatacagggtttcaggcatggttcaatccaggaaccccaccagtgtcacaaggcccatttccacacaacaggcttgatggctgctggcagccagcatcttccctgacatctctggcagagaggatgatgacagcatcgctggacagaccactatgtctaggaggaagcagttcactattttgtcagcttgagtcacacatacacctgtggcacaggaggaggcctgcttagttgattttcctagcagaatctcatggtttggggtggcttgtgtctacctctgccatgactgttcagaagccacagtcgaatttgtggcccaattctagcagacccctgggaccttaggacacggctttatagtcaaacgatctcaactgtattttgtttactcttcatttattaccaccaaacttccttgttcaaaaaagcggtgtcctctgtgtatttttataaggcacgtcacatttttttgtttgtttttgaagctaggtgggaaataaaaggagacaagaaagggaaggagggtgggaggaaaccaactcgagatccacatttcatagtgtttggttctcacgaaagagttcaatgaaaatggatgctccgtttctccagaaattttttcctcgtgggtccatcaataatgcaagtcctcagcttcctcttctctctctcaaacctagcgattcagactcacactgccatgtctggaatggttttaacccatttatgcctgaggttgcaattttttgaatttttgctatcagaccttggcaatgagcttgagcagtaggatataaataactcccacatgcttagcgtttcagtaatggaacactaggcataaatgggtttccagttcgttagaatgcttgtaccgtacttgcttactgggctcattttctagcagaaacctcactgctccggaccatccctgtttgggatttatggtaatacaaacaagagcagggccaggtgggcactttgtcatctgctatgagggctgtggtgcaggggtgagcatggctacagtttggggccactgtgttgccgcctttggtactggggtgaatggagacagtgtggggtggtggttggtcccagacaccagaattagatcctggcttcacctttgaagcctcggtttccttgtcttggaatcataatcgtacccacctgaggattgtgatgaagtgtatcggagataatgtatgtaaagtcttagcaaatgtctggcagagagtaaacattcaatgagcacttgctattattatttgtaataaaaacgaatttgactgtaactgaatggcagtgttttcccttaagtctcatttacctaaaggagcagactgcagacgccctcaggtacatttgtagggccacctgattataatagctctgataattacaaagcatgttatctttttgtcaaagatggccccctaattgcccctcctaggaaatgcttttgttgggctctgtccaaataggcacttgcagtcgttttccagattttctttaaaagtagctcatgtttaagaggcttcacaaattcagatagccttaattcttccattagactttgcaagggttcactgaattttatattttctctttatgtcatgaaagataagccaaactctattacccaggggagggcacccggaccaactgggaaaaccagataaggagatgtacatgcattgggactatctggtgaagagagacaagggactcttcaagacaagagtttttaaattcatctgaaccacaggacaaaggggcgtggctctgtgtgtgcgtgggcatacacgctacgtgggtgacgctggaattggtgttaacacctgctgggtttcaagcaccgtgcagagggctttcaaacgttttcttgcataatccccccaagaagcaaaccgagggataatgataatagtatcatgaagggatggagaccccaaggtggcagatgattatattagtgtctcatggctgttccaagagattgccaccaacttgggggcttaaaaaaacagagatttattctatcacacctccagaagtccagaagcagtctccttgggctgaaatcacggtgtcaggaggaactcactttccccagaggctgtcggggagaatccagcctcgcttctcctccggctcctgggggttgctggtcttccctggctcgtggctgcatcattctgatctctgcctccatcttcacatcgccttccctctgtcagcaaaactccctttgcccctcttctaaggacatttgtgatggcatttagggcatttggggataatctaggaaaatctcccatctcaagatccttaatcacatctgcaaagaccctcttttctaaatacagtaccatttacaggttccaaggattaggacctgatgtctttgggggacatttttcaacctaccacagtgatcctcagctgtgcgacagccttcattgagtgcccactaggtaccaggcattgttctaggcttgtgatctacaagatgcccttgagggactcctggtgcagatggagagaaggtgaaaagcctatttctaagactgtggtaaattctctaatagcatcagtgtgtggtgctctgtgcccggaagaggccccttagatgtggggttatcacttcctagaggaagtgtcccctgatgcagagtagattctataagtactttgtgaatgaattactgtcatgcagctcttaaacagcaaggccagaatgcaaacccagctctatcccctgccatccacctctcagttttaccagatggctgagggatggtgcggctgggctgcagggccacaggtggcacagaggatgcgctgatggccagggtgcttcaggcgttgtctgcacagatcgagatacactgaggatgtcatccctggagaggcgggcaaggccaaggcatttgacagccatctcataaatgccaaagcccccttggctctgatcccagaggccaccaattctttccggtcccctgccctggcctgttcagccttgcaggcgtgggtgggagttagctttctgctttgaaggtatggcagctagcaggagtcatgtacagtattggaatcgaaccccttttacaaaattaaatatgcttaaggcttctctctcaacttcagcgtcttaactgattaaacatttatttccaagacaaaaagagtcaatttagtatgaaagatatattttgccggtttaatttaaagtgctgcacctctgtctgaccctgattttcataactcaataattttatcctgtgttgattgtctcatttcgagagagatattgtatgtataaatcagtttctaaaatacccaaagaaactcgaagagtggaatttattaagctgcttctgttaagtctgaaatcatttattttggagtcgtccttgggaaatgtttgagcttatgctcctggcttacccaggagaggaattaccctgggagatgacagagttggacattcccagacaggttcctggggaacctgcatcttttgtgagaccagagaaactcctgggagagcctcgggcagatggaggctgggcccagccagaaatgaattctggcaaagctcccccgacagtagctatagattctgctgatcagggaaatgtgggtttttcctgcaccaagccctgtgggtccctggagttgtgtggtcttgctgtgggactcacttagtgcaggagaggtatgcagtgtcattcatgcattctcctcccagctttgactcctgtttgctatctttgggatcttggacaagttacttctctcccagcctcagttttcctatctatgaaatggggattgggatttcagctctggtgaactcacaaataggaaaatgggtagaattgttttgttagcagtgacatactagacaagtatatggatctgaagttcaatagtcctcccactaccaacgtcacacatatcactggcctaagggggctcaaatactatcaaatgcagtacttagtgctgcgtttcagattctttgtgttctaggtccccgtcccaaagcatcttgccaagataggcccttcatgctgcacacacagggctaggggctgtggcccagggtcccccaccccaagtgaagggcctttccatgctggtgccctggactaggctgttggggaaggggctgagctgtaccttagttgccacttgaccaccttgctttagagatggttcctgtgcccggagcctgggggcaggatttaaaacttggagtggggacttgatcctgggggcagggccttggacttagggacaagttctgggtattgactctgggaggtccttgatataccttggagtggggacttgatcctgggggcaagggccttggagttagggacagggtctgggtattgactctgggaggtgcttgatatacctcctaacacctcccccattttcttcctgttctgaactattcccctccaatctcctttctctctcctcttctcttccctaccactttcctcctccctgcagaaggcatggtctatccctgttggattctcacaagttgagacataggaataccctcccaagttgcagacacaaggaagaaagaccctcaacccttggtcctctggtcttctgaaacacagggggcagtagggaccccctagtccaacccattcatttcattactcttaatgcataacatttttggtttggtcttgtcttatgaatgtatcaattagcttttgctgtgtaacaaactaccccaatacctagtggcttaaaacaatgaattcttatgatttctcattatttggcaggtcagcgaggtagttgttttgatctggactgattcaggtgatttctgaggtccagcttaaagcctgcctgcagctgcttattctaggatggccttattgacattgcagtgcttggcccagggtcagctgacaccaaaggggaatgatttggccactctcatatctcgtgatgagaggtgtatgtctcaaggctgggcatcgtggctcgcctgtcatatcagtacttcgggaggccaagatgggcagatcacttgaggtcaggagttcaagaccagcctggccaacatagtgaaaccccatctctactaaaaatacaaaaattagctgggcatagtggcttgcgcctgtggtcctagctactcgggaagctgaagcaagagaatcacttggacccgggaagccaaggttgcagtgagccaagatcatgccacttgcactccagcgtgggtgacagagtgagactatctcaaaaaaaaaaaaaaaaaaaaaaaaaaaggaaaagagagatgtgtgtctctcatcacatggtggcctaggatcattcacatggtgatggacacagggtgcaagagagggtacaccccaatgtgcagtacttttcaaacctctgcacgcatcctatttgccctagcccattggccaaagcctgtcatgtggcaaatcccagagtaaggggtggagaaatagatcctacctcttgaagagagaaatggtagagtcgcatcatatgagggtgtgcacgcagagaggcaagaatgtgtagctaactttgtaacctaccatgatgacattttgggttttctctgtgcatttttggtttcttggcatacagtatcatctagtagtcaggtgtataggctatgtggtcaggctgacctaagttcaaaccccagctcccctccttgttacccccaaccctgtgacccagatcaaggggttgatcctccctgagcctcagtttcttcatctgtaaatggagatattgttacctgcctcataggagtttataaagagtcagcgatccgatgcaggtgaagtgtcacgcataggcaattggtaaatgtaagctgctctgtttattactttaaccactttattgacggggttggggtggcttcagcctcgtctctaagtttgtccgggctgacctgctgcttaccaactttgtcgggggctgaggtggccagggatagtgggagggccccagctgggggacaggcaggggaaggcatattagttacacttaggacctcggtcagggctcagagcttaaaagcaacagcggagtgacagttccactgcttgccaagaaagcgggggcccaagacgcaatgcttcttggcatcgtgaccaagggaaggatccatcttagtcgaagcagggggttaccaggggcacctccgagttgggcttttccaaggtgccatgcttttgtctaacgtccctctggggatggaagtagggggagcactgatctcccaaatgggtctctgagggtcctaaacagtggtaactagaggccctgggcttcctttgtatttaccagagtccagatgaaactcctggcccctgtttttcagaggcattaagcaaaagaaatatgtctttttacattttataaaactcagaaaaatggctttaaacagcttttgctctcctgctataattatttattttcaaacactcctgcaggggaccgctccgttttcttaccctgaactcctttttctcataaatgaaccatcacttcaataaatcattatggaaacagagactaacaccggctctgaaaggttgaaagatttatgtaacacatttatgtttcccattttctcattctggtactcggctgcaaaagctaagctaataaaagctgctattaatatttcttgttgcctagcaaccccagagcgggagtaatagcttcggctagaaaaatagatgaccgataaggaaaaattcaattcttttattatctcagggggaaatggccttttactggaacattatgatgtacgagtgtgaagttgaacacaaaagatttttttgtatgtgtttgtttttctgtttttaatgaacattattttacctccactaactcttttagggcacttttacttttctttcgtaaaccccccatcccatccctcatgcttaatttagcagctacagtagttaagaatctgtcggcgttctttagtttaaaaatggtttttgcaaaggtttacaactcggtcataaaaattcactccctgttaaaactcaggccagtgataagctaacacgcaggctggttttctgtgaacaggatcacgtttgttgacgagataagattcatggttttccctacaagaaaggtcggaaaggaacaaaacatgttcttttccatgtcccagttttctttggaaccagggacactgtctcttttgagaaccgtttgctctgcagtttgggatgcgttcacactgggagaggatggggcacagatattcactgagcacctgctctgcagagccttggtgccgttcccttctcccagcaccctttaaggtaggaaccattagggtgcctatttttcagatgcagaaactgaggcttagagaggccaagggatcaggctgaggtagcatcttttttatttttagtagagacaggatttcaccatgttgcccaagctggtctcgaactcctgagctcatgcaatctgcctgcctcagcctcccaaagtgccaggattacagacgtgagccactatgcctggcctgaagtagcatcttaaaccatggtgtttcccacctgtgttctttagcgcaggggttcccaacctcggcaccactgacattttgggtgggatgattctctgttattgggggtgtcctgtgccttgtaggatgtctagcagcattcctggcctctactcactattcctggcctctagtagcactaccctagtcaaaataaaaacgaaaaatgtctctagaccttgccaaacatcccctgggagcaaaatcacccctggttgagagcctccgcctgctgttcgctctgctgagaaggctgttccaccttgtccacccagtgaactcctattcctgtatgaggacccagttcagaagttatcttctcacagaggctgcctggatgctctgggctggaacgagggtgaggcatgtgagatgcgtgcctcaaccataaaatttaaaggtgtgtccaaaaagtcatcaagataaaaatagtgttttaacgaaatattttgaaaaggcaagattaacacagaaaaccatgatgaacaacatatcagaaatgtaaattaaggtgggatcagtctgaattcatggcaatatgtggttgtgcatttaccaggggccaccagcctgggatggcctgaaggctgggcctgggccttgtgtctttctctggccccagaatctagcaaagggcctggttagcaggtgaccttcaatgtctgtttattaattactgaatgaatgggagaagggaattacttgtccagggtcacatagccagaaaaaggatagagctgggacttgaacctgggcctctgactctaagcccagttcttcctgcacccgcctggctgagtatgagtatggggtgaatctttgttgtccgctgagtagggacctaagctgtggacgattgaaagatgctctggggtgctcaccgtctaggagtggcgggcagggaacagtggccgtgatttcagcttggtgtcaacccggctttccctggggctgttatttcggcttcaccacctctgtgccaggcgagagctgacgtgggcagctcagtgacatgtggagcatccccaagaacatcacgatggccagccccttgcagcactgctcatgcccatggggccagatgcttcaccttggcctttggaggtcaagaaccacaccttatttgaccttgtatcctctcagtgaacttttcctaaaggaatgggtgaattatttataactgtcatgtaacatttatttagcagttactatggaactggcacctacttaaaccctttctatttataatctcacttaatccttgaccctgagaaggaggtactgttattgttgccattttacagatgagaaaacagaggcacagaggggtaaatgacttggctacacagttatcaaaatgatggtgccaggaattgaacccaggcagcccgactccccagcctgggctctccatatctagcccatgtagccttccaaaatgaatgagtgaatgagcaaggcagtgagcgggacaagatggagacccactttatctgcccagctctgagttgagctattcatattcataaataatctcaacatgaagtgtgaggcacttgcagcttggaacaagaaatggaagaagtgctgagctcaggggactgtcccggcaccgaaggcttcctggagggggtagccttgggggccagaggacagtgggaaagcctgagaggaagaaatttcatatgtgcatggacctccctgttcagacctgatcaccaccccttccgctgaaattcataaaacaatttgtgatgttttatggttgctcagctgccctctggtacccaccctttccatcccctgctgggctcctaatcagagcactcgaggctgagtgcaagggccaggtgtttaacttccactccaggcagcatgccaagcctaacagggtatgaactctgagagctgctcctgagtcatgagggagaattaagggaaaatcgcagcgacattcgtcagctgcagcctcgatattactgggtgtaatggctctttcctccgagtgcatattcaggaccatgtttgggaaaatgagcttttaatgtaccgtcggcattgctgagaagccatctttggctccgcagaatgtctggagcacataaaacttgagatttattggagtcattttccccctgctctgcctggataataaaaagtcagtctcatgagctctctttctctcatcttgtggctttgtccatttagaactcggagcctttataaaaggcagcaagacaaatacagctcatctaaatattaaagctccaggagagagtgtcgggggactatggaagactggaggctgggagcgtttccaggacaagcgcgccccatcagagatttaagctcagcagctgtgttgggctggggcccgggctatggtggtggcagctgcttgcccaagcagtagcacttaactgggagtctggggtcctgggtgcctgttctaccccagtgggtgaccttgggtgaattactgtctctctcagagcctcaagtaagatggagctgatgctgtctactccacagagtgtgggaatcaaacgtgccaatgaatatttctgatgctttgcttcatgtgtggcatgtagcaggtgtctgaaaaaggtttgttgactgactgactgactgactgactgactgaaaaatgaatgaatgaatgaatgaatgaaaaataaatgcctctgtaaacacctcaaacatcatttttggagactaagttacatggggaccctatagcatcttctgtcttacacagcagtctgcttcatatcttctaaccctcctgttgactttaagggagatagaattctgctcatttacagatgtgttcccaagacctaaagggaaggtggcttgtccaaagacacacagctaggaagtggtgaagacaggatgggaccctgattcttttgaccccaagtgctttatgtcctcaacacaaaaacatccctcaccctatccttggcccaggcctctgagctgggatggtgggcaaaggtgggacccttgcccctgtctccctatcgagtgtgggtgttggtcaaagctctcagctgagacagggttaggagggcaaaagtgttggtttaatggctctgtctccaaactcctggtagcaaggaaaaagggaaggaatatcaggtgagtagtcagaacctgtcatagggtgtgtgtgttgggcagagctgtgggactgggatgctggagccctgaggaatctctaactaactaactaagcatggttagttcttcctgtcatcccggaaactgataacaagaccgcgagtcaggaagcctgggtttaacttcctgtctctgccaccactaagagattgtgggagacaagtcactttccttccggcctcactttcttcacctgttgaatggacaaaacctaaatcaccccagggagttgtggaaaggatcaagggagagggggcttctaaagcatttcatgaatgagctcctcaagagattcaagtctctggagggtgtggatcacagccggctcaggagagccccgggattaggaggtagggctccaaggtcaggcagcatcagctgcacatgtaaccagctgtgcgacctcagccaagctgtttaacctctctgtgccacagtttcctcccagggttgttgtgaagagtaaatgagacattagagatgctatctggagccgcgctagagggaggtctgcctggtcccacaggcagcactgcagcgtggattaggccacggagttgctggcatttgttccccagtgtgaactgtgaatcagtcatgggtcacaggccagaagtaggtggagctcctgcataacttcctacgtaagacggccccccaagggagggagagcattaggacaaatacctaatgcatgcggggctcaaaacctagatgacaggttgataggtgcagcaaaccaccatggcacatgtatacctatgtaacaaacctgcacgttctgcacatataacccggaacttaaagtaaaattaaaaataaaaataaaaataaaaagatggcccctcttggccaagggcagttctcgagaaaggggcaggtgtgtgcctttggcagccacactcccagcaggggatccagcaagacagactactgctgagctgcttctggaaacgtgatcctaaggccagcagcagcagcattgcctggggacctgttagagatgcagattctcaggcccctccctagacctggtgactgggagactcggctgggcccagcagcccatgcctaaccacgcctccaggggcttctaatgccagcccagaacactaggctgtggtcatcctcagttgagccctgaattctcagttgttttaggacacataggatgcacttgtgtttctgtttgccttgaggatttcatcacactgaggatggttgcagactttttccccccagaggaactcgaggaccgacacctctgcctgtggttcctggttctttcctaccctgtgcacctcccattgggacaggccttgaagcggaccctctggcatgatgacagtcccagcctgtgatcagaaagactctaggttttcctgaatcgcacgacgcctcatcctggggtgcttcatgggcaattgtgcaccaagggcctaagaagaaccaggaacaaaatgcaacagggaaaagaaagggggcctaggacaggggaggtatcagggacgtcttgtgaccagaacgcaaaattcctcccactgcttatgggggagaggggtgtgcatatgccggggaagggatggatcagcaaagcccattctttgagatcataggaggacagagtgtgagcaggtagacagactcagacatttgcagcactggtagcaactggcccgggagaactggaccttcgtcagaagcacagggtaacagcaaattatggggccgtaagccgagattctaagactgaaggatcagcctgagatggtcgctaccccatcccacaggactcctcttctcctttgggagccccagacctgaggcccctgtccctgtgcacacaagacccccaaccactccctttttgtctgccttgtgaacttgacaccttcttaccttctgcttctgtatccctcctctgagaagcagattaactctagccagtacattggctgtgccctgcatgcttccactaggtcgacttttttttgagaaagagtcttgctctgttgcccaggctggagtgcagcggtgcaatcatggctccctgcagcctctaccttcctgattcaagcaatcctcctgcctcagcctcctgagtagctgggatcacagacacacaccaccatgtctggctaatttttgatttttttttttttttaagagatggggtttccctgtgttgcccaggcttgtcttgtactcctggcctcaagtgatcctcccactttggcctcccaaagtgttgggattataggtgtgagccaccacacccagcctaactgactttgatcacactaaaccagaactgtaccttcccataacccactgcaaaatgaattccagatgtggtagggagcaggctcactttgcccttagcacgtggcggaaggcccgtcacccacacatgcgtccacagcacaagtgagcaatggccggccgatgacgctggagacaaaactgtccttcgggaacagccccttaaccgggactctccttgtcttctctgtgcccatggccctgctgagaggggggtcagcacattgccagaattaatgtcactggccttggacttggagagaactggattttgagtttctccagctacatgcgtgttgaggaagttacccaggccctctgaactttagtgtttttttttgtgtgtgtaaaatagatgtattattcattcttaccttgtgggttgctttgaaaatcagatgctgtcatgattataaagtactcagcatgggagccatggcaatgctattatttgtctctaagcactttacgtgtgagctgtctctttttcttccctgccaaccacatagagggctctgtatcctttctggttcccccaggaagtccaccttcccaagcattggtgaactgacagtggatacccacatggtctcacaggggtacctggcacaaacagtttactcatttttgcagttccatgccttattgtggccacagtcactgtgagcctgtgagtgtatccctgccctgtggcatgttccatgcctggttcttctctcggttctgtctgtcacactgtgagcccctcagccctggcatctcccctatacttacctctgtgcccatgaaaccaaagctcctccatgggcaggacctgccttcgttagaaattagcttagtgacccctgagtggggtgtccttgggatccaccctccaccccaagcaggtcctcagtgtgtttctatcaaacaggtacaatttttctcccagagacagattctagttgtacattagttggagtctaccaagaaacaggcaccagacgggattagatatgtaagaggagagagagagggaaagggaggtggggggaggaagagaaggccagaggaggggggaagcttcagaccatgatataggtctgaaaccagagggaaaaaggatgggaaggagggaggaaagggaagaaagaaggaaggaagtgaggtaggagggaaagatagaggaaggaagggacagaagggaaggaaggaagggatcccagcactttgggaggccgaggcgagcagatcacctgaggtcaggagttcaaggccagcctggccaacatggtgaaaccctgcctctactaaaacaacaaaaatttagctggatgtggtggtgaacacctgtaatcccagctacttgggaggctgaggcaggagaattacttgaacttgggaggcagagtttgcaatgagccaagatcgcaccactgcattccagtctgggtgacagagctagactttatctcagaaaaaaaaaaaaaaaaaaaggagggaaagaaggactgactggataggaagatctgggtagcaaggactggacaggaagcatcttggactgcatcagttttaagaaagattggccaggccaatggggagtcctcaaaccaaagctgcccatcagaagagctgcacaccttccccaaatggacctgccttaagcaccaatgtgttcagacactgactgggcgtgaccacaggccagcgtggcctgggaggcgcatgctcagggagccgaggagctgcagctggtgctctcagcatcagtgccacctggcacagaaggtctgagtcccacattttggtggccagcacagtccatcccttttgccacacagctctgcttctcatgcaggacagtgagcagcacctccacgtcccgtgggccctcacttctgcagggaaacttaacaaatgacaacctcattgctgcctctggtcttggggctgccaccagcactcacccccttccctccttcctcagccacatcccctctcccttagcccgtcccctctctgatccggtggtggctttttataagatagctttatcatacttctgtattgaggttccactatctttataagatgactattacactgagttctcctgagtaatctactacactgagatctcatacttctgtattgaggttataccatcttcctaagatgattattacattgagctctatacggttattaccatggagttgtatatagtattaccttatctcttttatggtcttcgtatctataattacaccctgattcataatgctaaagtcatatattggtggtttctccctctcttttctgttcacctttacccagggtttatccatcttattgctttatctacattgttttattcattttattcagaggactaagcatcagagttgtgttccaattctcttacttttctttctcttaatgttttccctctttatgaatcccttctttctttttgtagatgtttacattttttattttgaattctttagttcatttacttttattgtttattgtttaataataaaaagtttatggctgtacattttttcttagtatggctttggctgcatctataaattttgaaatgaagtcttcttacatcttttactttcttcccaaagcatagctttgtggatttgatttttaaaaaatggcacatgttcactgtgaaaaaaaaattaaaccaacaaatacaaagaagtaaaaattgttaaaactgcaccatccacaaataatcattattaacccaaccatttactaagtatcttttcagtcttatctttgtgcattatacacaaagataatatatacaataatatatacaatatacaaagatatacaatatacaaagataatatacacaatatataaaaatatgtacaaaatttacatacatgggacccgaatgtgatgccttttcctgtactttccagtgtgttctattggagcagttctaggacctgccaattttctgcaacagtgtatcatgtgtatacttccacgtgcataattacaggtcttgctcttccttttagtggctagataacattccatcatatgggtgtttcatcatgtacttaaccttctgttgatggacatttaggctatttctgatcttttctattataaactctcttgggatgggttctttgggagtggtgaaaaggattttttaaaaaattttattattattatattttgagggtgggatctcaggagagggagggagagatgttaaggcagacagagaagtttcccttggatgcgtcgagcctctgcctgcccccaggggtgttctggagcataaattgcaccacacagttgatcccatcatagggtaaaggggtagcctttgcacccccatgtccattcgtcgttggccagagattgggggatggagtgacctcctggggctgcagtacctgttggcaagtggtgtcctctgaagaagggggcagctgagagccttcaccaaccgatgttcccagcagctgggggacaggttgctgctccagtgaagggggcccaggaaggggccaagaacttctgcatcagctgcacccccactcatggtgccagagatatcagagttctccccctcatgtcagcactgaattttgtagaactttttaaaaatctgaactaatcctatgtgtgaaaaatgttattttctcccctcccaccacatgtctggatccttgggaggaatgagttacagcttcccccactctcagaaagaacccagatcctcagtggaggagtaatttgatgccatcaggagagcagggaccttggggctggaagattccagctcaagccccagctctatcctgggcaatcttcttcaccctttcagcctcagctttctcatctgtaaaaaatggtaaccatcatagcgcctgcctcagaggagggatgtgaggataaatgaggagccatttgtggagccttccaaactgtttacaggttgagaggccctaaagctcctggcggggtggggtggggacacatagtcctctgacgtggccatggagtcctgggtagggggaactctgatctttaagccagcttggattctaagatggcctgttgccttgaacggctgtacctgattggtcaacatttggccattgcccaaaaggggctggggataatgacttctttccgcgtgattatagcagcacaattcacaattgcaaaatgtggaaccaacccaaatgcccatcgatcgagtggataaagaaactgtgatatatatatatatatatatagacacacacacacacaatggaatactactcagccataaaaaggaatgaattaatggcatttgcagcaacctgggtgtgattggagactattattctaagtgaagtaactcaggaatggaaaaccaaacatcgtatattctcactcataagtgggagctaagctatgaggatgcaaagacataagaatgactcaatggactttggggactcagggagaaagggtgggaagagggggaaaaagaagataaacagcatattttgaactaaaaattactccttgatattaatagtgggcattcctcttaaattatggattaaaaaaaccctaggaatttgttttacctcaaaaataaaataaaccgtaataaacctaaaaagggggtgctggagagcaggaaatgtgtggcttcttctgcctccctgacactgtctcaggccagacctccccacacccccttcatcaattaaattgtggtaaattaggcggtaggaaccaccccagaactccaagtccttctgtgcctcaggtccactgtgtgacctcagggctggttctgaccctctctgggcctccttccttcttctgtggggtgaggccactgagccccatccctgagcacccacaactctcctgggaaaggatctgggaagcttttcctgccgcctcctccccaccttgggcatttcagtctcggcttaaccagccacttcaacacaggcaacacttttctcgagagttcataaaaacatgtaaacacgggtgaggatacaaaatattgagcggcgaggcagtaaaacacggcagtgtttgttgtgttaactgaatattcatgagctgactgtttaaattacagttcacaactgttgcagggcctgatgaataatttaaatgagggtggccaaagagatttcaacactgcattagcaaactgctcaggatcagcttcagagaatttataattagctcagaatagcctataataaattctttggaaagatggttttaattagcacatgtgccaattcagaatggagaatgttcagcgttcaggggagggggtgggtcaccctcccctccttcttatgtttccccgtcatgcggaggtcccaccacctgcctgggatccctgagccatgctgagcccacccggaacccaccaccaggcttcctgccttgagtctgtcccgcctccactgccccatcccagcttaggcctctccgccatagcctgtgcagctgcagaagcctctgacctggtctccctgcttctgtgtctcctgctccagttcatccccatgggggcagccagtgggaacttactggatgcagatctgattccatctctgccccatttggagatccttaattgaggaggcccagagagatgaagtggctggtcgagctcaaataggtcccagacaccagttgacttcagccagtgcctaggtgcttggggatgggtgaggcatcactggcagaaggaagtgcacaggcaaagatgaggaggcaggaatgttctgtgtgtcgggggccagtggggagcaggacaagcagaggcttggagaaagcaggggcccgaccatggcgtgcctcaaatgcttcgaggtggaggatgtaggagggaggtcccacttaggggatcatggaggctgccagtctggggcctagagctcccagcccacctggctcattcctcaacatgtgctgagtgcctgacaggtgccagacctcgggctgggcactggggaaacggctcagagcaaagcaccagccacggttccctctttcataaatggagcacacaaccagagccatgtacacactcagccgaaggtacgactaacagctgtgacaagttcaatggaaaaaataacagggtgtcaggagagagaatcagcagggatcctgatttaggtggggagccagggaaggcctcctgaaggcaagggcatttgaactgagtccaaaagtgagtaggggtgaaggaggccaactggtcccaggtggaaggggctgccccattcccagagggggtgctgtggctgggcaggggggtgagggggtctagtagagcccccagcagcagcctagggtggggctggactggttctgggagaggggcatctgtctatggggagctcattgctggaggagaaaataacctacttttctgctcccaaaccctcgctgcagcgcttagagctgcaaaccttgagcaagacattggagtttctctgcttcattccatcaggatcactcacgcactcattcagccctcacacttttattaagcccctactatgtaccaggcactcttccaagccctgagcagtgaacaaaactgatgacaatccctgattcctggagcttacattccagtgatacagacagacaaagacgcaaaggagtaagatgtgccctccctggcactcagatgggggaggaaaggttccctgccagattctctgatgccccctcccagtcctggtgctgtgggcagggctctcagaccccttttgaaatagaaactgaagatcaaattcaggaatttggaggattcacagcttggacaggtcatttttagttatccacctgctgtgaccaagggcagccagttctgcctcctcagctctctcctgtccatgacatctgccccatgtgcctcttgaccctgcctttagcctcttgccctgagcacaggggaacctgctgggccatcccccactcacacaccactctggacccccagtgactgccagaccaagtcctcatccccttgtgatctgcccctcctggctccccaagcttcgtcccttccttggccacagtgaaccctggagtcctggcagccccctgacactcagggtcgccaccgcgctgatgctgaacagcaagcctcgccctccagctccgcttccatcacagcagttctgtggtttgtcattgtttttgaccagtggttccctctcaattcttcacaaagatacagaaagataagtcacaaagattagtcaaaacaagacggatattgctgtgctgacctgcttggtgataacaagcaccataccctttcaggcactctgtaaccgtgggtaagaggatgtggtgaggccagcccagcctgcaccatgcccctctgccctcaatagtgaaaagagctcaaactttggggtcagacagacctgggtttggatcctgatcctgctctgtgtgcgctgcagacagggagccatgaacctcacctcttggaggctccgtttgctcaactgtaaggtggaaacagcagcagcgacctcacagggttgttaaaagaaccacttgacccccaaaatgagaacatggcctgtgagtggcaaacccatgttccagtcacccgcttctgcagttaggatccccatggggaattgctgtgatgggaacacctgccctccacaatcgcactttctgctcagcatctaaatagaaagttgtcctgtgacacctgcttactgtctcctctctcccctcgtggtcccagcagagcttccaaaagggggtcattgactctggctgtctatatttcctcccctcccatttgccttgacctctgcctccctgtgactataaaactcctctggttaggggcactgatggccttcacgttgccaaacccattgggcacctgctgtctttatcatccttgactttgactgtattagaccaggctcctggtgtcctccacccctcaggccacccttttgcaccctcctttataggactctcccgatgctccacgctcatggctgggtaccacaagggagtccaggccatttccactgctctatcccctctcctaagcaccagaccatgcaatcggcccccacctggaaacccccacttggatgtcatccccaagttcagctgtctacagctggccactctcccctacctggctggatgtgtctcttctcctatgtaagcagcccatgaatttcatcagtaatctggtatgagtcttaatctgccagaaccagtccccaatcctaagtctctccctccatctcttgctttccatctatctgagtctcagatggtggctatatcacctctcagctggaagttgccacctactcttagcagccaagctggcctttctgaaatacaagtcactgctctgcctaaaactcttatgggtttccaatgaccctcaggataaagtccaatgtcttcccctggcattcaaggcccacccagcctggcccctgcctgtgactctaagctcctccttccccaaccctcctcacccctcccactatccttcactcctgccaaatcagggcctttcctgatgcccagtgtgcccttgaccgctgatcttacagcctcacttggcctttggcttccctctcggccctcaccaccactgtgactgtgtattgatttgggtgtagatgagctccacagggcaggggagtcccagtgctcagcacagggcctggcatatagcagatagttaataaatacagatgtgcctgctataaagtgacacatgccttcctgaaaaacctgaaaaatcctaagaacaagagtttatgggaaaaatagagctgggacaaactactcaaggtctatgcaactttgtaaccagagcactaagagaaaaccattacattcctaatgtatatatctgcacaattaaaaagcatttgttaaattcttccttaaaaaccctcagtaacaactggggaggcattttgatggaaggggttttgaggaagggtggggagacattttgatggaagtgggtgtgaggttcactgctgagttatggagacaagggcaaaatgcacaaagatggagaagcaagcagttggcgcctttacaccagagcaggtggccaagtggtatgaaggtgggccaagtggtacacaagggcaggtgggggaaggtgggcgaatgggcattggaagcagcgctgcttcctccactgtttgctgagtcctgctctgttagcgccctctgtgttcagccgctgttccttggtagcataaaatagtactgcgctggaataagcctgtatgactgagcaggactcctctgcaatgccactttccccgttcactggaaggggtgagatacttgtgtcacaggagcacgctgcatttgtcaagtgggtgagcgcattagtagcatgggttgtgctatattggtgcgattagctcattccatctgtttgtcccgctggacttggtggccccttctgcgtggcaaggtctgtgcctgcattctttgtgtctcaggtcctgtggctcattgaccgccaccgtttaggtcctgaggctgtgacagttcacaggccactgtttctgccctcaaagaaccaaccgagaatacaccatgtggcctgtgggagttacccaaaagcacttgctggagaaatgcctaagctgcccattaagagacttaccataggccaggaaaatgaagtgggctctgaaccttggcaagaaggggtggatttgggagaccaggaggaggtggcatgtgcttttgagggcccagcagaagtggagggtgaagggagggggaggttggtggataactcattcaacattcactgaaccccctgctaggtgtcgcggtctagataccagcaggcgctggtctagataccagcaacacatcagtgaacaaaacaaagatctttgcccatgtgcaatttacatcctagcagggggagcgagataataaacaataatctactaaataagtcatgcagtatgttagcaggtgttaagtactttggaagaaagaacagaagcataatgggatggggaatgctggcccggtgtgaggggcaggggagcgggttgcagtattgggtaggatggtcggggaaggccttctgataaaactgtggtttgaaggaagtcttgcagtaggtgagggagggagcagggtgagtatcccctgctgggtgggggaagaacattccatgcagaggcagtagctcacctcccatggttttccagctcagcactactgacattttggactggattgttcttcattgcggggctgccctgtgcattgcaggatgttggccagcttctctggcctctacccaccagatgccaggagcgtccccgcggttgtaacaacaaaaatgtctgcacataatgccagatatctcctggggacaaaaatgcactgagctagaagagagccctgtggtgggaggctgctcgagtgctgaaggaagagcaagtgggggtggatgtgatggagaggggtgatggaggggactggagttggggaggccagagaggtgccaggtggtggtggtggtggttgagttgttataggggcttgtggctcagtaaggactttggcttttacttgagatatagtagggagctggagctggctctgagcagaggagagagggtctgtattgcagaggtggggagcacggggactccccacagccccatcccaacctgaacagaaacctcacacccccagctgagcaatcccagacccaggggcttggtgacccgtatttgcaaacctttcttctaagacaaaaccagcccccaaaggggacaaattgcttttcatttctctgcttctctgccggcggcttcatattcataacacgatgatcagtatcaccaggaatggggctgttgccttaaaggataaattagtctgactcttaactcaataattaaaactgtgatggcacttggcctgcagggataatatgctattattatagtcgtttgtttcaattaaatgcttactgattttacaatagcagctgggcacctgtgcgctacagctattattctgaacaagacatctacatttcaggagaaatttgtcagcgtgcaaaggatctcccaccaagcatgaaagtgtattagcaatacgtactgacgaggcttcggggccagaggcaggcacgggggaggcttcctattggttctcttttcctctcttttgtgctagattttttttttccaaaaaggagatagttttcaattatttgacacttgaagccccaggacatctcagagagcagtgtgcccctgggaagactcgcatgggggagctttagttgtgacttcccacatcattgattctgggctgcagtaaactgaatcatgccccaccagatgcccatgtcctgatccctggggcctgtaactgtgttaccttatatatcaaaaggggctttgcagatgtgatgaaggtaaagatcttgtgatgggcatatggctctggtttatttgtgtgagctcaatgatgtaatttcagaagtacttacaagagggagatgggagggcccaacagacagaaccactgctgatgaaaccacagaagcagagagcaaaaaggtcatgtgatgtggggccacaagccaaggcatgaggatacggttcatccaaaaaaaaaaaaaaaattatggaaatgcttctcccctggagcctccaaagagaacgagccctgccaacaccttcactttagttcagtgagactcattttggacttctgacttccaggaggtgcatgtgctgttcttgctcctgcaacggaaggaatttttattaagtttgtggtaatttattacagtagcaacaggaaactaatacacagagtctctgctgccttctcagaggactgagacgtgtcgactttcactggggaggcagatatgctgcagatcatagggcttcttgtcagttatcagtgcccagacctgttgcctgtggccatccacttagcatctgcaagcatgcttaccctccaacaagtcccagcctctggatacccctttatccttatctgccaccctacccatcactccagccctgccaggctccaggcagcttgcagagctcatcgcactggcccatgcctcagtgcctttgcatgtgccgttcttgctcctggtacaccctctgcaccctccttatcttctgcagacttcaagagtcagttcagtttttttttttcctgtggaaaggcttcctggctgtccaggtattggaggggctccttctctggcaccccacaggaccccaggcacacctgggttgctgcactgtttaaaattgtggggtcatttctgcctcccccaccagaatgtgcactcctgcgatggggtgtttctggctcagggtctcagacataagaatcctcagggaatgtttatggaatgaatgaatgaatggagtaccaggagcagcatggagctctgggaggtcttgagaagtgaaatggccacagaaagagttgtgatgagggcagctcaagacagaggcctgcagaggatgtgagaaagaggctcgaggcagtgactcaaggaagctcagagtcagaggacagaacagtggccaacttctgggtctctgtcaccatccaggcctctctgccaggtctagacttccaggctggactccagacttgtgacctctgcttctccttccaggactggcatgcaggagctttgtcttgacttctcacatcattgatccaagtgtggtgggctggaagagaatacccccaaaagatgtctacatcctaattcccagaccctgtgaacatgttagcttccatagacaccctgttggctcccaaaacttaacacatgtctgcctgtgctcatcaccttcactctgctcaatcctgctcctccttctatgtctccacctcagagaattgcaatagccaccccttatcaccatttcatcccaagagtcttgcttgactcagccactactcatcccacgcattccactcaatcacctgtcaatatcaatcttcctcagtgcctctcggacctacctggtagatttggccactgccatagactgtaccagccccctctctgggacctcttgtctcctctctcaactgcctcatccatgtgcagccagagtggttccatcgggcaattctgaacacgtcctcccctgctgaaatcccttcgatggctccccatgggtctgggagagccttcccctactctggctctcaggccttttgctgtccatccctgctggcctctgaagcctcagtgaagccaccttgggtcctgccaggtccatgtcagctccacggctttgcacaggctgtttcctcttcctggacaccctcaccttcttcaccagctaactcctgagcagctgcaagagtcaggccagactccacttcctctcggtggccgccgccttctgcagactaggtgggaaggtcgctgcacatgtcttactcctgttcccccacgaccaccacacaaggcgtcttgaaggagggactgtgttctggtcagccatgtgttctctaacccagcatctgcactcagcactggacatactcaacaagggttgctgaagggctggagggagacgtggctgatgcgtggggagaggctggttcttgcccaggcattgggaccctgctcaatgccagggagatgcagagagcttgaatgtgctgggtaatggggtaatatgggccagccaggtggctgtcatctgtcaggttccctggaaacagactccgagatggagattgtgcacagcaagttttaggggagcactctcaggaacgtcacccatgagaagtaaaggaagcagcctggggcagagagagaacttgaaccaacgtgcattgctacagaggcttcagccaatccagtgagctctggaatgctaggatgcgccttctgagatgtcccaaattgagtcaacggggctgggcctttgaacccccacatcagtgaatgtagaccaccccttggaagggcttgtaaccatgggggaagcagctccatcagccacaggcaattcctggagagggttgcagctgcgagctgtcagaagcccatatgcccggcagctggagaactgagtcctgtggtcctgagggggccgtcgggccgtgcaggggtcacagctgcactgattttagagagaggctacaacgcaaggttagagcaagagctcagcttgtggccagcacagggcttggccaagtgagagcacactgagtaggtgttcactgaggctgtgctgggcaagtgggtgcagcaatggggtagggctgtggacacaggcctgggagccacacagacattcatgtgaatccagctgtgccgcctacggccaaatgaccttgggcacgtgacttctcattctgagcctcagtttcctcatctgtaaaatgtcgatgataagcacccctttctcgcatgcctgagtaagaagtaactggtcaacaggtcagtgtctggcaaatgctacctgccacataaaggataacatttctaccatcgcttctacttaccacactccactaccagaaggattgccagtctgtggccctgggccaaaggccctctgcccatttttgtaaataaggttttattggaacacagccacagcccttcatttgcattctcatctatggctgctttcctgctcctgcagcagaattgagttgagtagtgattagagaccatctggcccacaaagcctaaaatatttactgtctgaccctttacagagtttgccaacccctggatctgacaaatatagcgaatatttgtgaagtgccctcctgtgccaggctgggtgctgtcatttttagtgtccttggaggctccctcctggcatccctctcctctcagatttcagaaccttctattgtttctcacctcttcttttcttttttgagatggattctcgctctgtcgcccaggctggagtgcaatggtgcgatcgcagctcattgcaacctctacctcccgggttcaagcgattctcctgcctcagcctccgagtagctgggattacaggagcccaccaccatgaccagctaatttttgtatttttagtagcgacagggttttaccatgttggtcaggctggtcttgaactcctgacctcaggtgatccacccaccttggcctcccaaagtgttgggattacaggcatgagccatggcgcccagtcatttctcacctcttcttagcccagttgaggtgcagttcaagctcataccttaagcaagttaatgaggggatgaagaaaggaaaactttcgtcttgaacacactaggtgtctgactctgtacaaagttagctttttgtttgatcctcacagctgccccatgagggcagggtcattgttaccccatgttgaagctgttaagatctgtatggatacagtggaaaacatctcagactcagaagacaggcagaattctggctttcccactttctggctgtgtgatcttaggcaaatcacttaactctctgggtttcagtgtctttattgtcaaatgggggtgataagagtgcttccatcaaagatttgttggtgactcttctagcatggttcctggggtgtagtgagccctcactcactgaaatactagatattattatcattattattattgctatcattttctataaaacaaagacgttgggatctattggaaagtgctactcttttaaattactcagtgtcaggtagttctttatagcagtatgagaatgaactgatacagaaaattggtaccagtaacggggcgatgctacaaagatacctgaaaatgtggaatcaactttggaactgggtaacaggcagaggttggaaccgtttggaggggtcagaagaaggcaggaagatgtgggcaagtttggaagttcctagagacttgttgaatggttttgaccaaaatgccgataatgatatggacaatgaagttcagtggtctcaaatggagatgaggaacctattgaaaactggaataaaggtcactcttgctatgctttaatttctgattgtgctcagaaattaacgagaagtgctgggtgccgtggctcacacctataatcccagcactctggggagctgaggagggtggatcgcttgagcccaggagttcaagaacagcctgggcaacatagagagaccctgtatctacaaaaaatataaaaaattagccgggttccgtggctccacctgtggtcccagctacttgggaggctgaggtgggaggatcgcctgagcctgggaggtggaggctgcagtgagctgtcattgcaccactgcactccagcctgggcaacagagtccaggaattaaggagacgtttctgaaccctctcaaactgaagcagggacttaaataagagcacaattgaacatagccgttgttgccatcagaagattgattctacatcgtatacatctgtcagcacatcagattggaccctatgcatgtatacaactatgacttgtcaataaaaagaaaagaaaaaaatttaattgtgggggaaaaaaattccacctttccaggctgaagaaaataaaaaaatttaattgtggaaaaaaagaaaaaaaaaaattccgccttcctgggctgagtgtgaggctgtgttgaatgacagctcattcaggcttcggaggacgcagggtggctgccagctctgtgaatcggcagaaggcgggaaggaggaaggtgtgatttttcttgttctctcctcactgtgtggggttacactaagcacacggggctgctctccatagagactgcaaatggggaatttgtgaaaaacgcccttgtgttcctgcagccctgcgaagctattaagctctgcgatcctaattacattcacagccgcctcgttcctgctgcctccgtgtctcctccttcctggggcgggtgcagatgtggctcgggagcgtggccatatgtttccaagagggaagcaggaggctggcttcacttggttcccagacatctcatgagtgccggctgcctgcccagccctctgcctggtgctgggaggcaggtgtctctgcacttgagcagatgccgggaggcaacgtgtggagagctctgccagaggcttggaaagagggtgaggccagaggatggagcaggagagggaaggcttctctgaggaggtgacatttcaggtaagccataaaggaggatgacacagagggcaggtgtccagtctagagagaagcccacatgtccccagggagctctgggaaggggctggagaggtcaggaggagagagattgtacagatcctcatggagcattttacatggctaggccattgctaagtgggcccctgggagctgctgagagatggagagcagggaggcgacatttcatgctccagaagggtcactgcaggggccagcatggtgcctggactcaggaggccatgctggaggctgggactagagctgcatagcttgagatagccctgaaaacagaccctgacacaaaggtttgggtgcaagtagtttgtctcaggggtgaacccaggaagcccttggagggaaaaaggcaagtgagattgaaaggaaagaaagtcatgggttgttacctctgtgggcaacaggaacggggtcctgctgtggaccctctgaaagacttgtggatgtgatccgggaaggatgtcaagtcttccaggacgcaagtcagaatcgtcccactgaggggagaggaagtcgaggtttcatctacaaactcctgttcctcactggctgagggtcattcctggggccccagttggtcagcacttccaggctgtttggggcacagaacaccctcaggcagggtgccgagggaagctgtccgcatgcacaataaccctctgtagggacccccgaggtgggccgagggccggggggcagggtctccactgcatctgctgcagctgatcaggacaaaaggccttagctgctaaaagtgttggggcagcggggtgtgggttctgattggagtaggggtctcgtgagctggtagagtgttctagaatgcatggagggatgggcagggtctcaccacttctgtgtccctctcttgtgagctcaactttcttcttctaaaggctgaaattggctttaagcaaaacacgttttgaggtgaaacttgggaattttagaatcatcacggggatgcccctatctgtaggtgtctatggaggagccacagacttacttggaaggaaagtaagatgggaggaaatgtcagaaccttaggaacaccagcgtttagtgggtgggctgaagaagagcaggaaggactggctggagaggtggttggacagtcaagcactgggccctggagaaaggaaagggagctgggaggggaggcagcaggcccaggagttgaggatggagaagtgtcttggggaaggcatcataacttagggaggagggtgatactttggagaagctcaactccacctttagtagctgtgtgattatgggcaagtctcttggcctgagacttggctttttctgctggggatgattatattccgcctcctgtatagttgtgattaaatgagtcataagtggacatggtcagcacagtgtctggcacatattaagtgcttaataaaaatctgtcctcctcttcctctttctcttcctcctgatgaggatggtggtgaggacactgattacaacggtatgggtagtaatgaggacagatgccaggtgagtcgctggtggggggagtggcccaaggacagtgaggagagacaattctttgcacagttggctgcatggagaagaaggaaagttggggcagaagtttttaagagacctggagctaagagagattttaaaagatgggagaggagtgatattgatgagatgcagccgacagacaggggagacaggagctgaactgatggaggtgggggctgtctagaagcagagcctgagatggggttcttgtgaaggttgtttactgagggaggggctgcaggaatcagggattgcaagggaaggggctgagcatggatgtagcctcggctggagactcgcttcaggctgattccacagggagccctggagcgcagcttcactgcacagccagcagggtggcctttagcacccctgtgccagtcaagcagtggtgaggtctgctgcaaggtgggctgttggcgttaagatgtcatagtctcctgggagaagcagttcccatttggccacttttctggagatgggggcaggtgcagatgatcccagcacacaggggaatgggtacagaagcatggtaaagggggcggggtccggcaccgacagtgtccactacagcgggcatcctcaactagcaggcctcaaatgagaggcatatctttcaccgtggggaagttaggacaaagttttttaaatgccctagaaaacctgggatgcttagtggctgtccccatgtttttgctggtttttatctaagaatagccagtcatgtactgtctttatgaagggaactgtctctctgactgtgagaccctgaagtgcggttggggaagtgggcgctctcatccccaaagcttgccattgtgtccatcacaaagcatggactcatgaaaggtccgactatatattgagaatgtatttgtaactatagcaagaatgaagcttctccacagagacttgacatccttcctgaatcgcatccagttctgctgttgtggctttaattttattaaataggtccaacaagtatttgcttttgcagtgtgcaggctcgaatctaggaatcaggatataaagaaaagtcactggacaattgtacaaaatccgtagttctaaagagcacacattctgagaatcttactccaaaaaataggcaaaaacattcataataaacttcaattatacggtgtatccatgtgatgagaagaatttgcaatcaggaaagattgctttcaggtaaaacatgtgtattagtctgttctcatgctgctaataaagacatacccaagactggataatttataaaggaaagagatttaatggactcacagttccacagggctggggaggcctcataatcatggcggaaggcaaaagagaagcaaaggcacgtcttacgtggcggcagacaagagggcttgtgcaggggaactcccgtttataaaaccatcagatctcatgagacgtattcactatcacaagaacagcacaggaaagacccactcccgtaattcgattacctcccattgggtccctcccacaacatgtgggaattacagaagccacaattcaagatgagatttgagtgtgaaaccatatcaatatgtgaccactggatgtaaaagtttgttgaaagcagcgagcaacactggttgtaaccaaataagtgaagatgatcagctccaggttttctcccaaaactccaagggagaagttaaagggctcaaaattatgactgaaaagataaaagatcgtgatgattcaatgtgtttaataggaaacttagcaaaaaggcaataatcaaataattgtagaaaatatcacttatctgaagaaagtggaaaatgttccaaaggacctagcaaatatcagcaaaattaaatctgttacccacattaaaaacatcatagtgcaatgtttttatttcaaagaaactttgagactcaaaaaagccattattattgttgtcattattatttgggggatcggattttattctaagaggatcaacaagccaatgaagaattttaaggaggatagtagcctggcctgacttatttatatagagagatattaattgcttgggatgtgaggagtgtgaaagacataggattcattatggaggtggaaccaataatggcgtgtcctggctagtgcctggggttgtaagggaaagggagaagtcagggtttctgttcaggtttgtggcttgggtgacagcaagaacagcagtgccattttactattttggtaaaactggaggaggaacagttttcaggagagggaagagctccatttgcagcatgtgaagttttatatgcttgcggggcatccgagggaagatgtcactcagggacttggatgtgggagtctggagcccaggttggggatgaggggatgaggctgaccctgtttcagacatttcagggtgcctaatgtggccaattaagttatgtaggtaccagccatttcccctcattccagacttcccagaactcatcacatttaagtttaacactctgcttggaagagcccatattgttgttgctgctgctttggatctgcttttgaagaaataaatattgcaggtacaagttaaggtccctttgtacctctctgttctcagaaagaaataaccactattctgcagtgagtgtttttatgcttttactacattttcatatatccttgaacacctgacagtgatgttttatattttaaacgtgttcataaaggcattatactgtatgtgtccttctgaaactatcttcactggttattgtctttgagttcatctgcattggcagctgtaggtccacgttggtcaggttaaccgtctacagaattccattatgtgaatacaccacagattttcgccatctcccagttagtgaatgtttatattatttccagtttttttggaattaaatgccataatgatcatctttgttgtaatgcataactttctaaaggtaacatcataactctcatacaaatataagatgaaagcatgccaaaaatttatttaagtcgtgattaatgaggaatccagtaagatatgacaacaggttcaaaggtgaatctgaagagtagacacatatataggcaaacaggaatggtgagataaattttctaagaaatggacccagccatcccattactgggtatatacccaaaggattataaatcatgctgctataaagacacatgcacatgtatgtttactgcggcactattcacagtagcaaagacttggaaccaacccaaatgtccatcagtgatagactggattaagaaaatgtggcacatatacaccatggaatactatgcagccataaaaaaggatgagttcacgtcctttgtagggacatggatgaagctggaaaccatcattcttggcaaactatcgcaagaacaaaaaaccaaacaccacgtgttgtcactcataggtgggaattgaacaatgagaacacttggacaaaggaaggggaacatcacacactggggcctgttgtggggggcggttgtggggagggatagcatgaggagatatacctaatgtaaatgatgagttaatgggtgcagcacaccaacaaggcacatgtatacatatgtaacaaacctgcatgttgtgcacatgtaccctagaacttaaagcataaaaaaaaaaaaaagaaatgcaaaactgcttaatggctatagagcaaccaaacataatgtttggaatcatcctttttacagggtgggatcaattatatccctaccggacaaaatttctttgcatttttatggacaagaatgggtttcactctacctcacacctattaggatggcttctattgaaaagagggagagagagaaacgagtggcgtggatgtgtagaaaccgcaaccggaacccttgtgtgttgctggtgggaattgaagtgatatagccactgtggaaaacagtatggtggtttcttaaaaattaaaaaacagaattactatatgatacggcaattggaattctgggtgtctactcgagagaattgaaagcagaggctccacgagatacttgtgcacccacattcctagcagcattattcataatgcccaaccaactgcctaccagcagatgaatggataagcaaaatgtagtctatacatacaagggtgtattgctcagccttaaaaagggaagaaagttctgattcagctgccacgtggatgaaccttgagtaccttaagctaagtgaaataagtcagtcacgaaagaatactgtgtgattccacttgtttgaggtacctggagtagtcatagttctagagacagaaagtagaagagtggtttccagggctgggggaagagaggaatggggagttcttatttactagggatggagtgtcagttttgcaaaatggaaagaattctgcagacggctgctggtgatggctgcataatggcgtgaacatatttaatgccactgaactgtacacttaaaaatggttgatggtaaattttatgtgtattttatcacaatttaaatttttaatgattaaaaaaatcagttgcattaatgtcacctttctagagcttacaaagttgtaaaataaatagcctagacaaagacgtgtactcctatagaagcaggtaaccccagaggtctgctggacaatgccccgcagttcattgaatgacactcatttgtccatcttgaagtcttttgcagttttccacactgtgtgtatgtcttcttgtgcatgtgtgaaagttctttatagtaaacatcttggagtagaattctaggttataggatatctgcatcttcaatatactgagtgttgccaggttgttttctaaagtgttttacatactagtctacactcctaacagcagtgtatgcagaaacataaatggtccagtaaacttatgaaaaggtggtcaccctcactagtgatcagaatggtggaaatcagaatgactttgagagaatttcacacttagcaggtttgcaaaacttcaaaaatccgccattatcaagagttggtaaaaatattaaatcaccaagtcaggaatatctgatggaagaattctaaagcaggccactgggaagaaaaagaaaacaagccctaatacagagttctaaagctgatttgatcttgaggagctaatgccagattcttgcttaaggcttatagaaggtgagagtgcgtaagctatggggtgggaagaggagaatgtttggagaatacattttaaaaccttctataaaacagttcactttaaatctgtctctcagatatttgtatgattaataatcaaatacatatatgtcacaatatattaagaactgggttagaaaccagtatctacctacacactgtttacacttaaaattatgcaggacaaaaataaaacagtgaaaacttagagtgataatgatagcagataaagtaggatgtaagacagaaacattaaggcaaagatgcttattttttatgagcaaggagaagccacagtaaagacataacattctgggacatttacaggataaataacttcacgttagtgtgtatgcagaaaatctgtttaaattttagagagaaactgctggaaacacaataggaatggcaggctttgtggaaaacagtatggtggtttcttaaaaattaaaaaacagaattactatatgatacggcaattggaattctggatgtctactcaagagaattgaaagcagagtctccacgagatacttgtgcacccacgttcctagcagcattattcataatgcccaaccaactgcctaccagcagatgaatggataagcaaaatgtagtctatacatacaagggtgtattgctcagccttaaaaagggaagaaagttctgattcagctaccacatggatgaaccttgagtaccttaagctaagtgaaataagccaattcttttgagattttacacctaaagtaaagtagtcaaaactgtttattgaatagacatatggagaaatttgtacaatatacagtattatttccaatatacatgaacggttttgcaaaaattgatcatactttggtgacacaatagtctgtataccaaacccctgtgacatgcaatttgtctctataacaaaccttcacatatacccctgaacctaaaagtttttaaaaaggaaaaacaaactgatcatatcctaagctataacaaaaatctcagtactttccaaaaagataaaattctgggagtcatggtctctgatcttgataacaaaggatacattaaataaaaacactcttccaaataactttagggtcagagagaaaataaaatcatcaatgtagactattttaaaaatacttatatgatgtagctaaaattctccctgggagaaaaatcatagttacagtgcagagtttctcaacctcagcactattgacattttgggatgcataattctttgtttagtggggacatccctggccactacccagcagatgccagtagcttcccaccctccagttgtcagaaccaaaaatgtcttcagagaaatgccccctgcatggtaaaattgctcatctcaactcctgccctagatgtttctgttactaaaaaagaaaatgtgaaaatagcttaatttgaaaacctatgtaaaaaacaacatatgctacctcaagtcaacattaatagagaagaaagcagaatttaatgaattatcatgaaagttgtcaaatttttttaacatctgcactaagaaaaattcctctgccttgggatcctgttgatctgtgaccttacccccaaccctgtgctctctgaaacatgtgctgtgtccactcagggttaaatggattaagggcggtgcaagatgtgctttgttaaacagatgcttgaaggcagcatgctcgttaagagtcatcaccaatccctaatctcaagtaatcagggacacaaacactgcggaaggccgcagggtcctctgcctaggaaaaccagagacctttgttcacttgtttatctgctgaccttccctccactattgtcccatgaccctgccaaatccccctctgtgagaaacacccaagaattatcaataaaaaaaaattaaaaaaaaaaaaaaaaaaaaaaaaaaaaaaaataaaatataagagctggttctttggctagacagttgaaatatataaacttttggccgggtgtggtggctcatgcctgtaatctcagcattttgggaggctgagacgggtggatcacttgaggtcaggagtttgagaccagcttggccaacatggcaaaaacccatctctcctaaaaatacaaaaagtagccgggtgtggtgacatgcacctgtaattccagctactcaggaggctgaggcagaaaaattgcttgaaccctggaggtggaggcagaggttgtggtgagccgagatagcatcactgcactccagtgtgggcaacagagcaagactccgtcacaaaaaaataaataaaataaattttgagaaggaaaattttaaaaagcaacgtgtattcacaatattacaattttgaatgggaactgatgaaaaccacagagtatatttttaaatatattatccagttatatgctagtacatgttagtatctggataaaatgaatttatatatatatatatatatatatatgtataatttaccaaaactgactcgagagaaaatggaaactgaaatagacctattagccatgaaggatattgtgaaaacaaaaagcactgggcctcagatggttttctgtttaagctctttcattctctaaggaaaatgtaatttatatgttatctatactgttccagggcataagggaagagttcaatttctaaagctgatcataacaaaaacatttgacaaaagtaaccctaaaaaataaaaactaagagatttgtaataaaatacatgccagacacattcaaacaaacatacaggcaaggacagcattattcatatcagactccactgaattcaaggcaaaaaaaaaaatgagacaaaaaagatacttaataaagagtttaatccataatgaagatacaattgtctgtcttctttttgtaataaaaaccaatatcagggccaggtgtggtggctcatgcctataaaatcccagcactttggcgggccgaggtgggcagatcacttgaggtcaggagtttgagacaagcctggccaatatggcgaaaccccgtctcgctctactaaaaatacaaaaattagccaggcatgatggtgccacctgttgtcccagctacctgggaggcagaggttgcagtgagccaagatcgcgccactgcactccagcctgcgcgatgcagcacaactctgtctcaaaacaaaaccgacatcaaattcccaaaacaaacactttaagcattaaaaggagatatttttatggaaacagaaaaattgcaggcaatctggacaagcctgtgtaagattaaagagccaaaaaggtaaggaatctaaagaataatcactgatggaatggaaaaatatactgctgtattcatctgcaaacatagcctattctttgtaaggactgtggaatatgtacacaatttaatcatatttgggtctcaaagaaaaccttaacaaaatctcaaacttgtaaatagtacagaccccatactttgataatttttgttactggaaattgtagccaaaagaaaaagaaaattagccacttagaatttccagaactcttctttttgttagcctttttaaatttaagctccagggtatatatgcaggatgtgcaggtttgttacctaggtaaatgtgtgccacggtggtttgctgtacctatcaactcatcacctaggtgctaaacccagtatgcattagcatttttcttgatgctgtccctccccttgccccctcaacgcgccccagtgtgtagttcccctccctgtgtctaagcgttcacattgttcggcttccacttacaagtgaaaacatgaggtgtttggttttctgttcctgcattagtttgctgaggataatggcttccagctccatccatgtccctgcagaggacatgatttcatccctttttatgactgtatagtacttcatgataggtatgtaccacattttctttcagtctatctttgatgggtatctgggctgattccgtgtctttgctattgtgaatagtgctgcagtgaacacacacgtgcatgtatctttatgatagaatgatttatattcctctgggtatatacccagtaatgggattgctgggtcaaatggtattccagaagtcttcttgaacaactcttggatcaaagaagaaagtagattttaaatgttctcatctaagcaatgctaggtgaggtgatgaatatgtcaattatttcacagtgtatacatgcatcaaaacatatcgtacatataaatatatacaatttgtcatttgtcaattaaaaaataaaatacaactcaaaattgagggggaagcagcaattatgaatctttaaaatgcggaggaagggatagctaaagacaaagaattagaaaacagagaagcagaagtgatacacttgagatttgattcttttgaggagaaaagaaacaacccacataaaactgaaaacctgtttgctttcctaatgaagaaaaaatgggagaaaaacagatacttgatgtttgttagaaattagaaagggcaaataaataaccacagatgcagaggaaataaaaatcgtaagagtatgcaaataggtatgcttcactcaacagggtgtggacatatatttaggtccaaagtcctatcctcaatgcgtgtttagtgtgaaaaatgcttatatgtaaaaccaataactttccagaagtaaccagttagaaaatatcatggggaatggagttaataacaaaattgctgacctgtaggaagaaaagtactcaactttatcaagaaatttatttattcaatgtatttaacacatgcttatacaatatagggcttactgtatgccaggtacatttgatctttaaggaaccctagaatgtaggtttgctcatatccacattttacagatgaagaaactgaggcacaaagaggttaggtaacttggccaaagtcacccagctggtagaatggcaggaccaggattcaaaatgtagttagcgtcgtccagcatctgtgtgcgttgctatcatgctgactgctcagttcatgcagagacatattgcattccaggagggaagactcggtctcatcaaatgatccaacataactggactgagctctctggcaggggctgaaatgcaaagcgtctgtccgaggtgaatgtcagtagaatggcacacagccacggagctgccggtttcccacgagtgcacttaatcatacagaggtccaagtagcatgaggctccatcttgagattcacctgtcagggatcggagcaggagccgcacccatcacttctcctctgcattccctcctctaagtccgctagcacagatgtgatggagtggcaggacagatccttcctaactcaaccctcctgtcctcctctcttagatccaggagatggtccactcggaagtggctgcctatgactcgggccggcccgggcccctgctgggtcgcccggcaatgctggccagccacatgagtgccctcagccagtcccagctcatctcgcagatgggcatccggagcagcatcgcccacagctccccatcaccgccggggagcaagtcagcgaccccctctccctccagctccactcaggaagaggagtcggaagtgcatttcaaggtatgtgcggtggaggaacagagcctgaagctgccctcctgtcggcagggaaggggtcctgtggggaaatgggcatcacctccctctagtaaagactagaaaagcctgatgtcccaaggtccccgtaggtgccattcccactgagcaggcgttcctggtggcggttgggatgtccgccacagagctcagtggttttctgttaagacccccaggccacgctggaagccaaggaaaaagcacattggcaggtggagcacctggtcaggggggatggcacctatggggctttgtggcatcgggctttggctgctccaagtgctgagcgtccttgacaagctgtgttccctcggggctcccacagccttgtgcgtaaagcagagaaaattccaacaaatgttgaggggatggggtgagaagatcctgtgaaagttggcaaagactgactcctgaaggccagtgggcgatttcagaggtgtggacggcttcagcaaggccatcggggtcacatttatggccatttggcccttttaggagaaaatattctgacaaaactgtgtggtccagaagacagcacctctgggcctagagtattcactgaccttgagggtggggtgcaaaaatgaccgccccactgggaacatgcattcccccaacattcctggagtctagagtggtttgacctcctcaagaacatggtagggatgagagcccgccacctgtccgggctctggcccttctttgcattgactccaaatccacctcccggtgagagaacatcttgtcttaccagggaggaaaacagaggcccagaaatgccaaagacagaagtgtttgcccagggcctcccagcgagctagtggcagaattaagacttatctccctccgtgcctcctgcctctgtcgatccagtgtcctttccacgtggtggcctcccgaggcctagggcagtaaccctggactttgggggaagaggggtttacttctggatcctggcccagcttcatcctaaggatgactcgacctctattatagtccatgcaggaacggtttttatttaacaaacactctctatgggccagacactgctctaaacacataacaagtatacgtccatgtaatcctcataaaagtcctatagggcagggactgttattatctctgtttggcagatggggacactgaggcacagagaggttaagtaatgtatctggtgtcacacagctagtaagtggggggaaccaggattcaaacccaggaggctgcaggtgcagtccagtgtatgtgccctcaaccccctgccctgctgtgcctgttcaggactttatcaatgacaacatgcctcttcatccctgatcttgctagggtcacaccacggtgctaacacaactggggcttggagaagggagtagctgcagagataagcctcaggaacagaaccatgtccttcagacatggatgcctgatcatgcctactggcccatggctttgtcatcaggtcaacatgtcacctccatcttcttggctcctagagccagagtcttcactacagggtccagggcttttgaccaaagtcccctgttcctacatggcttgagtgacccaacagagacccactgaggtctgtggtgggcatcccaacaccaccccatcctggaagccctaagtcaagtgttcacaggatcatggtcctgcagtctgtccagagtgaagccactggttccagggctgacgcagtaacagtcgctttagcctcgtgccctccccacttcacagggtcaagggactaagccacctgctcaaagctgcacagctgaaacatggcggtggagaccagccttttgtaatgcaggatcctttttggggattgtgctcacaagtgggagggcagatatatacacacacacacacacacacacacacacacacatatatatatacacacatatatatacagacatatatatactatatatacacatatatatacatatatactatatatatacatatatactatatatacacacacatatatatactatatatacacacacatatatatacatatacacacacacacacacgtatatacacatatacacacatgcacacacactccaaacttggaaataggcccccaaataactgcacattctttcaatgtcataccaaagccttggctaacaggctcactcaataattatctgattccctaggaaactggacctttgctttgattcattattcactattgattaggggatttcacaactctgtaaaagaagatgttaccttgggcgggggaggggaagtgataagagatgtaagggatttttgtctgattataaggcaaattaactttgcccggtagagatgcaaatttctgtccagtagaaaagattaaaagtcccaaaggtgatagtttcagcgctctattgggcactaaccagtttcacgtgtaatttagtaatctaattccagcattctttccattctttcagtgactatacagtccgtcttctcctcctgcatttctctgaatcaactttacaatcatgctgattctctttaatgagttaaacacccacccagggtgtgtgtgtctgtctgtccattgccccctccatcgcgcgagtggttatctgtgcatgagcagggctggagaagtgcagctcggcccaagtctgtgttgatcgcctttggcaggaggcccttgggcttctttggttttctgactcttctcactcgggcagatctcgggagaaaagagaccttcagccgacccaggaaaaaaggccaagaacccgaagaagaagaaaaagaaggaccccaatgagccgcagaagcctgtgtcggcctacgcactcttcttcagagacactcaggccgccatcaagggtcagaaccccagtgccactttcggtgacgtgtccaaaatcgtggcctccatgtgggacagcctgggagaggaacagaagcaggtgagcctccctctctttctgggccatcccctgaggctttgtggtcctggaaccaaggacacactttgaaggtctgaaaccaggcccagctctggaactagagactcttacagaggtctttcctgggctcaggttgcccatctgtaaactgggaagctagctgccttccaattctactaaccaactgcatttactagcaacttaaccactctgaacctctgcttcccgcaacttaaccattctgaacctctgcttcccccttgataaaatgagaacaagcatctccatccatcttgtcccaccaaccctaaaagtctggagtccaggccagagcttcctatcccactgaccatgtgcctgtggcctcctctaaaggcctccagggagaatagagagcagaactagctggtaggcaaatggagttgccagctgtgtgacctcagcctgaccacctaaactctctgagcctcggttttcatgtctattaaaacaggggtgctggctactccttctctgagctcacatctgggctgggctttccccccggtatgtcactgaatccttacaacaccctgtggagtagccattgctttcctgtttggtagagacaccaagaggtaaagtgactcacccagggtcaccagcgtgaatcaaggtagagtcaggatttgaactcacatctgtagaagcaggaggctcaactgggctgttggcatgagagacatgaatcaaataagcagatgagtaaatgtaaaattacaattgtgattgtgccgtgtaccaggagggtacatagttcatgagagtggaaagagcagggacggacattgtcccaggggtcaggtcaccaggtgagacctgaagtgtgagttctctttggaggaggggaagtgttccagacagggaggcctggtaaggaaggaggctggaaaagcacaggggactgaaaggagaccaggatggccagagaggagacaataagagtacccatggcagagacggagctggaaaggagggcaggggccagaccacgctgggctttgcagaccttggaagtagtcaggccctgttctaagaggagagaaaaccagtgaagagttttatgtagaggagagactggaacggcagcataaggcaggtaagagtggatgtggagggtgcacagtgatccaggtgggggaaggtagggtctggagcatcttccagaatggtttagggtaggggacacagagcatgtcctgggagcctccttgcatctggcttccattctgagtaaatggagatgccagtcactggatgggaaatatggggaaagtagcaggcttggggcagagagatgaattactgacttatttgaaacatcatctttaccgtattctaaaattttaggtaattttggaatatgttataatgcagagagtttatttgggagatgatccccacctctggtaggggagtggggaaatgagacagggaaaggagggcagccaggaaagggcacattgtcccaggagaatccaccatgggcaactggagcacaatcccgctgggaactcaggagcctgcttagaacgtgccaggcctcagggtcatcctgtctgaggggcaagggtgctggggtggacaccagcattccttcagagctgctccaggggacattacttctgcagcacccctggcctgctacacatgccaggctcctgccaccagagggaccctcaggcaaaggaatatagccggtggcagctggaagtagagcatgtttgtaggacaggggtaaggactgggggatattggcagggcactgtggcttttgctatagggacgtctgtcattttcacttgtgtgtttcgttggcaaccaattccctttcaaaagacttcaggttgtttttgtttggtggggggatttccttgccgttttatacagtctggggagacagtggtctcaagtcctatgtccccgggcactccctccaccgatgctttctctgacctcattcagcgcagcccagaggcaagcaaaggtggttgagagtcccagcccctgtgtcggtttcatttctgcttacctgtctgacgttttatttctaacccaagaacttggcatatatttatttccatccgataatgggcatttctctccttttacttaatgcgttcttttacttaatgcgttataaatggcttgtttctccccattttcctagcaaattgttgagtataaaaagttaggaatttaatttgtaactgccaagcttactatttattttatcatttctgatcatttttaattcctgagtcttctaggtttaaaaaaagtgtctataattatacacatatttatacatatgtatcttttacaaatgataattttgtctcctttgttatttgttttttaagagacagggtgtcactctgtcacccaggctagaggtcagtggcatgatcatagctcactgcagccttgaactcctgggctcaagcaattttcccagctcagcttcccaagtagctggactacaggcgtgccatgcatcaccatgccccacaaaattttttcttttttttggtattttgtagagacagggtcttgctgtgttgctcaggctgacaaactcttagcctcaaatgatcatcccaccttggcctcccaaagtgctgggattagaggcatgagccactatatccagccatatctccttattttgtctcctcacttctcagatttctaattctgttttcttttcccagttatgttgactaggacttctaaaaaagagatgttcagcaatggcggggatagtggtcttcttactttgcattacctctcatgtttcactattaagcataaggctggatgttagcttgtgtcagtttttgaaatcacatttagaaatgtgacttatattcctattttactattaatacactaataaccaagagaggtagtgagaaaataataggaaataaaaaaaccttgcctatcccccaaaagtttcaagcctaggtgatggataggaaagttctttcaaatcatcaaagagctaataattccaagacttagaaaaataagaaaaccttcacaagtctttatatacaatgtaaccttgacactaaaacataatgaagctaactgcatcatttaattttgaatgtgtaataaacaataccaaaatttaatggcttaaaacaataatcatttattcaacttatgattctgagggtccatgaactgtgctgggctcagcaggatggttctgctgctgctcttggctgggctcacccatttgcatcagtggtcaactacagtaaattaggcatctctgcttctgggagttggatggctgtcagctggagcagtggagccaaactgggccatgtgtctttcatcatccagcagactagctcatgcttattcacatagcaagtcagagttccaagagcagttttagagcagaaaaatggcaggaaggaggcaggactaacttgcagctcccactcggacagacagagcacggagactcacattgtgaacttttgctccaagaactaccacaggaacatactaggaaagccaaaagaatccacagacactttgaaggatgtggattgctgctgcaggctctctgggacagccaaggaattgtgagttggcgtgctttctcagctgggaggcctgtagcctggggcaagttctcagccctgttcactagctgcctggaaataaactcggtgctgttgggggtgcatggtgggagtgagaccagcctgtggctgccagctttccctcacttccctgacaacctgtgtgatgcagcagtcagccataatccctctgggaaccacaacccccacagcatctgcagcaagccccacctaaccctgcccctacctgatggtctttctctacctgccctgttagcctaagacaaaggacataatctctcttgggaactccatggccccgcccaccacctgacactagggcaagcttgtatcctccctatactactgcagctgatgtgctctagaaagtgctacctcctggctagaggccaaccaacacaaaaccagtgcacttaaaaatacaaccaaggaccctcatggagtccacttcactcccctgctacttccactggaccaggtgttgatatccatggaggagagacctgaagacagatcacatcacaggactctttgcagacactccccagtactagcccagagcccggtagctccgctgggtggctagatccagaagagaaataacaatcactgcagcagggctctcaggaaaccacatccctaggggaagggggagaaccccaagggacaggagaatctgaatagcagccttgagtcccagatcttccctctgacatagtttacccaaatgggaaggaaccagaaaaataattctggtaatatgacaaaacgaggttatttaacacccccaaaagataacactagctcaacagcaatggatccaaaccaagacaaaatctctgaattgccagaaaaagaattcagaaggttgattgttaagctaatcaaggaggcaccagagaaaggtgaagtccaacttaaaataaaaagaattatacagcatatgaatggaaaaatctccagtgaaatagcataaataaaaacaatcacaacttctggaaatgaaggacacacttagagaaatgcaaaatacactgggaagtctcagcaactgaattgaacaagtagaagaaagaacttcagagctcaaagacaaggctttcaaattaacccaattcaacagagacaaaaaattttaacaaatgaacaaagcctccaagaagtttgggattatgttaaatgaccaaatctaagaatcactggtgttcctgaggaagaagagaaatctaaaagtttggaaaatatatttgagggaataattgaggaaaacttccctggccttgctagagatctagacatccaaatacaagaagttcaaagaacacctgggaaatttgtcacaaaaagaaggaaaggaaaacctttcagattaacagcagatttcttagcagaaaccctacaagctagaagggattggggtcctatttttagcctccttaaacgattagccaagaattttgtatccagcaaaactaagcttcattacagttctttttttcaaagcaatgctgagagaatttgccactgccaagccagcactgcaagaactactaaaaggagctcaatcttgaaacaaatttttgaaatacacaaaaatggaatctccttaaagcataaatctcacaggacctctaaaataataacacaattttttaaaaaccacaaggtatttgggcaacaaatagcacaacgaatagaatagtacctcacatctcaatactagcactgaatgtaaatggcctaaatgctccacttaaaaatacagaatggcagaatgaataattgaccaactgagtatctgctgtcttcaagagactcacctgacacataaggacacacataacctttaggtaaaggggtggaaaaagatactccatgcaaatggataccaaaagtgagcaggaatagctattcttatatcagaccaaacaaactttaaagcaacggcagttgaaaaagacaaagagggacattatataataaaactagtccaacaggaaaatatcacgatcctaaatttatatgcatctaacattggagctcccaaatttaaaaaaataattactactagacctaagaaatgagaaagatagacagtaaaacaacaatagcgggaaacttcaatactccactgacagcactagacaggtcatcaagacaaagtcaacaaagaaacaatgaacttaaacttaccctgcaacaaatggacttaacagatatttatagaacattctacccaacaactgcagaatatacattctgttcatcagcacatggaacgttctccaagatagaccatacaataggccataaaacaagtctcaacaaatttaagaaaataatagaaattatatcaagtactctctcagaacatagtggaataaaactggaaatcaactccaaaaggaaccctcaaaacaatgcaaatatatggaaatagttaaataacctgctcctgaatgattgttgggtcaacaatgaaatcaagatggatattataaaattatttgaactgaacgataatagtgacataacctatcaaaacctctaggatacagcaaaagtggtgctaagaggaaaggtcatagcattaaatgcctacatcaaaaagtctgaaagagcacaaatagacaatgtaaggtcacgcctcaaggaactaaagagagagaacacaccaaactcaaacgcagcagaagaaaaaaatgaccaagatcagagcagaactaaatgaaattgaaaccaaaaaatacaaaagataaacaaaaagctggttctttgaaaagataaataaaactgatagaccattagtgagattaaccaagaaaagaagagagaagatccaaataagctcaattagaaacaaaacatgagatattacaaccgataccacagaaatacaaaagatcatttaagactactatgaacacctttatgtacataaactagaaaacctagaggagatggataaattcctggaaatatacaaccctcctagattaaaccagaccaataacaagcagtgagattgaaatggtaattaaaaagttaccaacaaaaaaaggccaggaccagatagattcagagctgaattctatcagacttttaaaggacactattccacaaaataaagagggaatccttcctaaattattctatgaagccagtcaatcaccctaatacccaaaccaggaaaggacataacaacaacaaaaaaacgaaaactgcaggccagtattccttctatgcccaaaatcagcatagaagggatatacttcaaggtaataaaagccatctatgataaaccagagccaacattatagtgaatggggaaaaattgaaagcattccccttgagaactggaacaagacaaggatgcccactcttaccacttctattcaacagagtactggaattcctagccagagcaatcagacaagagaaagaaagagcatccaaatctgtaaagaggaagtcaaagtgttgctgtttgctgatgatatgattgtatacctagatgaacatgaatgcaaaaatcctcagtacaatactagctaactgaatccaatgttgtatcagaaagataatccaccatgatcaagtgggtttcataccatggatgcagggatggtttaacatacacgagtcaataaatgtgatataccacataaacagaatttaaaaccacatgatcatctcaatagacacagaaaaagcatttgacaaaattgagcatccctttgattaaaaccctcagcaaaatcggcatagaagggacataccttaaggtaataaaagccatctatgataaatccagagccaacattacactgaatggggaaaagttgaaagcattccccctgagaactagaacaagacaaggatgcccatttattcgatgcagtactggaagtcctggccagagcaatcagacaagagaaagaaataaagggcaccaaatcagtaaagaggaagtcaaactgtcactgtttgctgatgggattatcatatacctagaaaaccctaaagactcatccaaaaagctcctagaactggtaaatgaattcagcaaagtttcaagatacaaaattaatgtacacaaatcaatagatctgctatacaccaacagtgaccaagctgagaatcacatcaagaactcaaccccctttaactgcaaaataaataaataaataaataaataaataaataaataaatgaataaataaaatacttaggaatatacctaaccaaggaggtggaagacctctacaaggaaaactacaaaacactgctgaaagaaatcgtagatgaaacaaatggaaacacatcccatgctcatggatgggtagaatcaatagtgtgaaaatgaccatactgccaaaagcaatctataaattaaatgcaattcccatcaaaacaccaccaacattcttcacagaactagaaaaaacaatcctaaaattcatgtggaatcaaaaaagagccctcatagccaaagcatgactaagcaaaaagaacaaatctggaggcatcacattacccgacttcaaactatatggccatagtcaccaaaacagcatggtactggtataaaaataggcatatagaccatggaaaagattagagaacccagatataaagccaaatccttacaaccaactgatctttaacaaagcaaacaataacatgaagtggggaaaggacaccttattcaacaaatggtgcttggataattggcaagccacatgtagaagagtgaaactggatcctcatctctcaccttatacaaaaatcaactcaaaatggatggaagacttaaatctaagacctgaaaccctaaaaattctagaagataacactggaaaaacccttccacagacattggcttaggcaaagacttcatgaccaagaacccaaaagcaaatgcaacaaaaacaaaggtaaatagatgggacttaattaaactaaaaagctgcacagcaaaagaaccagcagggtaaacagacaacccacagagtgggagaaaatcttcacaatctatactttcgacaaaggactaatatccagaatctacaaaggaactcaaatcagcaagaaaaaaacaatcccatcaaaaattgggctaaggagatgaatagagaattctcaaaagaaaatatacaaatggccaacaaacatattaaaaaatacttaacatcattatgatcagggaaatgcaaatcaaaaccaccttactcctgcaagaatgtccataatcaaaaaatagatgttggcatggatgtggcaaaaagggaacacttttacactgttggtgggaatataaactagtacatccactgtgaaaaacagtgtggaaattccccaaagaactaaaagtagatctactgtttgacccagcaatcccactgcttggtatccacccagaggagaagaaattttacaaaaaagatacttgcacatgtttgtagcagcccaatttgcaattgcaaaaatatggaaccagcccaaatgcccatcaatcaatgagtaaagaaaatgtgctacatatatatacacacatatatatgtacacacacacacatatacatatatatgtacacacacacacacacaaacaccatgaaatactactcagccataaaaaggaaggaaataatggcatttgcagcaacctggatggaattggagacaattattctaagtgaagtaactcaggaatggaaaaccaaacattgtatgttctcataagtgggaactaagctatgaggacacaaaggcataagaatgatacaatggactttggggacttggggaaaaggatggtagtgaaggataaaagactatcatcaggtacagtgtacactgctcaggtggtaggttcaccaacatctcagaaatcaccattaaagaacttattcatatacaaaaaaaatttttaaataagagttccaagagtagcaagagggctcaccaatatgtgatcactttgtcagtctctgcatgcatcacatttgtgcttgtcttattggccaacacaagtcacacaaggctaagctccaagtcatttgcacctcctcgtttctaccaaaagccatggaaacaaggaggtgcgaacaaactgggaccagtcctacaataacatatgaacctaggtctaaaatttttaataaaaaatattagcaaaccgaatccaaactaacatactatgaacaagtaggttcattctaggttgcgaaggtggttcggcattaagaaatctgcactgtgctggctcagaatgggggcttcaaagggcattgtctttctgtgatcagttgtgctgatagaacctggaggcccagagagatgaagcatgttggccaaggccacacagtgacttggctgaggaactgggatatggcctggtctccacaatttctctgcagcgctcccagaaaggggccagtggctggctgactcagcttctgaccccaccaccctcgtccattcgtgatccttgaatccatgccttcccaccccaggaccctgcacggcatctcctctgtaactttctccccagtgttgctcatgtgttgactcttccaggcctacaagaggaagacagaagcagcaaagaaggaatatctgaaggccctggcagcctaccgggctagcctcgtctccaaggtaacacccggaatctccaggcacagccctgatcagagtggggccacttgaggaatggagcaagaactggggcccgtgggaagggccggcaccccaggtcttagaaagaatggctcagacctacatggtcatgtctgcagggcacctacagcatgccaggctcattctgggcactttacatgcatttcattggcttcttccaacaagaacccagcacccagaggggttgagcaacttgcctgaaaagatccagtttgttaaagtggccgcactaggattcaaacccagttttgccagttttatgtggccttcacttctgaccgctgatggggcttgggacacgctaccccaaaatatggcacctcctcaccacaccgtcggcctcctctgtcaacaccagcaacgtaggaagctaagtgtggctgcggatgcgtggcccaagtggaggtgggtgttgttcctggtacagaagagatggcatccaaactggtctataacaggccaagtaaaaggtggttcaaagtcaagggaaaaacatctacaaaggcacagaggttggaaggagcatgattagagctggctcagtgggatggtgcttgtctcactggccaggctgaggagcatggattcccccaagggcaggggagccccccaaagataaaagcagtaggtgactggatggtcagagccaaggggactaaggaccctgtgctatctctggttagtccaagctctctcccaagacagccagccagcagccgtgtcagtgggttgcagagcctcctggcctcacagcccatgttctggctcatccctcttctgttctccagtgactgatatctgtctccttccagagctccccagatcaaggtgagaccaagagcactcaggcaaacccaccagccaaaatgctcccacccaagcagcccatgtatgccatgccaggcctggcctccttcctgacgccgtcggacctgcaggccttccgcagtggggcctcccctgccagcctcgcccggacgctgggctccaagtctctgctgccaggcctcagtgcgtccccgccgccgccaccctccttcccgctcagccccacactgcaccagcagctgtcactgccccctcacgcccagggcgccctcctcagtccacctgttagcatgtccccagccccccagccccctgtcctgcccacccccatggcactccaggtgcagctggcgatgagcccctcacctccagggccacaggtaagcagggaagagcagaacagcccttctgtgaccgtgtggggaggggaagcggctttgccctttcaaaccctggccctgccactcaccagtgatataacctcagccttggcacctgacctctctgagcctcagttaccacatctaggaagtgggtctcgcacaccttacctgagatgtgctggctgcagtgaacagttcacgagttgccagactgactcttaggatactccagtccccccttcctgcatcctcagccctagccctggcccttcccaaagccttcgagaccttacccccgctaattgttccacagagattgctacgaggttcacatggcccttagaggtcattgggttcagtaattccattttacagatcgagaaactgaggcccagaaagggaaaggccctgaaagccaagtccttcagcccctgattcagccaagacaagggttgaacattttgaaaggtgctctactgggagcaaggcagcagccctggaggcagcatctctttggtgtggacacccttggacacatgggctctcaccccgggaggcctgggacagtctgccccctcatctctccttggctcatggcctcctccttcccactctgtaggacttcccgcacatctctgagttccccagcagctcgggatcctgctcacctggcccatccaaccccaccagcagcggggactgggacagcagctaccccagtggggagtgtggcatcagcacctgcaggttagtcctcgcccgtccctgcctttgtcctgccagccagggagagtgggaacaggatggccagggatgggagaatggccaagggcaacgtggacaggggaggaccctgcagtcactgtcagccctgctgaggggatcgatatctcagatgacaccgcagagccaggccccggaaggactctgctggcctgatgctgaggcctgcttgggaaactgactagtcttcagtcttgctgcttcttccttgctcctgtttttttcacaagtgcttccacgtgacattcacagatgagtcctgcatcttaggccagttccctagaagcagagcctgaggcagcagggattgggtgcctttggggatgcactggggaaagcttgcaggagaagggggtgagggaggcaggacagggtgggggaaggagctgaggggggatgtggcctcagctgaagacttgcttctgcctcatcccatgggagccctggagcatgaacggtgctagagtggctcccacctggaggtcagggaactggctttttgaacccttcatcagtcagcccttggctgtgggctgccccggggtgagtgtagcccactgggcagggcagctcccaagactagaacagctaagaatgcaggacaggggacctcggtgggacacggtgggagaagggacccactgtctatcccaaggaattacagacaccttagagaccccttctccctgcaccccagtgtcctccctagtcctcctgtgggcctcctgtctcaggcctctgttcctatcctgcactccacctttcaaacccatgctaacacctccctctagaaagtcttcctggatccacgccaccccaactctggggaagagtgacctttcaacaaccgcagccagcaggagagggagagtgcagtgaggagggacacttgctccttaacccgccagccaggttcccattcccttggcaaaaatgagtcccgcagccacacctgggggacgtagtgccaagcagctgtcccagcgatagcgccacaacctggaaggcacagcgcacttgtcgggtggccaccttgctgctgagaaacgctgcccccagccctagcctcggcctcccagcacacggctggttcctctgctgacccaccagcgcccttggacactgaacaagtgaccagcgcgcatgccccatttctgacatgcctgaagtgagattctacatgggtgggtggactcagctcagcaagaatcccttccctgcaccccaagcaggtgcagaccctcctaccccagccctttcctgtccctaagtttccttctcaaaagtcagaatacttagggtatgtaggggagtgtcacacaatgtccaagcctcctgaggcttgcccatcacatccagcatggaggtcagaccccagcagggccgtattttaaaaacataaaaagcacctgtcctcccttaattcagtttgagatttacaaattcctgtgattaaaaacccatgtgagagcaatggtgacatcggcgtgcgcctcgatgaaagacagacacgctactgccctttcacccagagctgaggaccgggtggtcccctgctgggtttccgggaggggtttggttctgcttggtgtagaggtgggtgggggtgggacttgcagatgcaagtccctcattcagccacagaggggcagctgaatccaggggtgggggtggggcgtacagtgcaggggtcctggtgctcccctggcccggagaggtacccaacagctttgacagcccctcctctctctcacagcctgctccccagggacaaatcgctctacctcacctaatcccgcctccctaccatccctgaggctcgctggaaggcactgctcagagcctgaagggctgacagcagaaaagaggccctggccagaggcagggtggcccatcggagagagcagtgacacacccattgcccgggggctgagtctcttcctcaacctcccaccagactctgcagaggcagcccactgcccaccaccagcccaaagaacctgcaggaaccttccgcccgctgacctgcttgctccagggtaactgtggaccctgtcctcgccctgcgcacggtaccctatgtctggacacccggccccagctccagccccagcccaggtgggccgcccctggcggggtcgcttaccaacggacacccaccccagatgcatgggccagagggccggcccccggcatagatgtgcacatcggttttccagtgtgaacaaaagattacgaaacctagaaactgttggttccgtgtaagtagttgactacgtgttttagaactgtgctgaagacatctgtaagactattttgtgggggaaaaaagtagtttcctttaaggtaaaaagcattttatatgatccttagcacatttttaagttttatcttaagggagacgcgcacaaaagcggctgccaaaccgtttcgtcatcctcacagcaaggaccggacgcttgctagccaccccggagcactgctctccttttaatcatgtattcatctattttaaattgccggcgacgacttttgtctatttatgaagaaaccttgagaacgaagttacagcttatcctaccgtgtgtgtggttttggggtttcgtttgggtttgggttcttgacgtcgtttgcagctgtttcctggccctggcgagtgtctgtcttggtgcccagtgcttctctcaaatctctttataataaaacttctgaaaagctgaaaacaagtctgtgtctccttgcccttggtgagccagggttgaaccccctaaagtggcatagagcccctcgggccagacggacacgggtcaaagtcttgcctgacctttaccagcccatgtgggtttgtgtgtgggtgatgggaccactctgacctcagtcttgccctctaagggggtaacagtggtcagacccgtagggctcttgcgacgatgagaaggggtgtgggcaagaacgccgccacacaggaacttgcatcagctggtgacagtggcgagcccttcctctggaggatggggccacccaggcttgtggaggtgagcagtgggaatccagggaggaggccaaggggtttttcaaacctgagtgtaggaagcatcccagacagggaattctttaaaccagatttcccagcagatgttagatggtgatactaacaacgacagcaaacaacaacaaaaggcaaataatagttgactgttttaactacatctggaaaaataccaattgcctggtgggaggctgcaactcttgcaccctgtgatgcagccattttgaggtggggacaggtgcccccgctcccagccaggctcgggaccgagacagaggagcccccacactcaggacagctctcccagcctctcactctccaatcacggtaaaccccctccttccagatgacagcccaggagtggggtgcagtttccccactggagggcattttgtaatccactttagaaaaataaaataaccccaaaccagccacctgccgtcccgtcagcagcagcaccgcaatgtgcagcataaatatttcatgtggttacaatttccttttctatgtggggcttgtcagtaacacgacggcttagacagtttaatattcaactcttgcttccatgtttgtgaaaacagcatcactgggatccacgcagacagcccacaatgacaagagtacaaggccctccttgtacagtggtgctgaggcggaggcctgctgccacccctcacagctgcaccaggagctcaggagtcctttccaagcatccacacgccaagaccaccccctctaggctgcacgggacactcagaggccccaagcagaacctaagcgccctgcctgcaggtatcagggactgtcgcacgggtgtgttctggggcccagagagtgagaatagagcctaaaggccaatttcagggccatggagtggacagcgactgtcttagtccatcccagctgccataacagagtgccatgggccaggtggctcacagcaacacaaacttactgctcagttgtggaggctgggaggtctaagatcaaggcgctggcagcttcagtgtcaggtgagggttcacttgctggttcgtaaacgtccatcctctcgctgtgtccgacagggcaggaggggagggtgctctccagaattcaacagcactcaccccaatcctgagggctccgctcagtcaccttccaaaggccccgcctccaaatactggcccgttgagggttaggattccaataatcaaattccgggaggacacaaccattcagtctgtagtgccgactgcagtagttggcactggtgtccccctctcgcctgtcctcttctgttgccagagcccatccccaggtcctgagtgccatcccagtcattgccccccagagctgccacagctaatgaccaaataatggagacgccaactctctggtcccattcacaacccgagtccatgggagcagcctgaagctgcctccagcggcaacaccatccttgctaagctccctccccccaccccgccctgctctgaggatgtgactccctcctgggagcacccactcagtaaatcgcttgaaccagaatccccatctcaggcccgtatgtttctaaggcaacagcctaccatactgactatgcccatggcccaagtggggccacatcggtattgctccaaatgtctctggctctggtcttacctgcaactacaagaatttcagccccgaaaccaccacccaagccccactccagggccttcctccttcttgggaggcagtgtctgctgcatgttttctattccatcctgcaatgatggtggccacgacccacagcgcctccaagaacccagggtcacaccggctgtgaaagcactggggtctctgccatgggctctctcactccccatccctgtgctcccaaagctgccagccctgggtgccccagccttgtcgtgggccaggttctccctgcagcatcctccacctgccggggccagtctacggtcggggcccctcacaccttgaggcttcaagttattgccagaccctagagcagtgtccccaacagtgtgaacacctttaactcctacctgcagcctgcccccactgcccacagagctggcccagggagcaaccccactcacccttcccagggccaagcgccttcctcaggtttctccatctcacacctcccccaacaaactcatctcggtccaaacaggaggcaggacctgggccgaggctgagaccacgccccctcccccaaccccagaaggcagtcatggctggtcccaaaattgcccagtagtcattcctccttggagggatacacagaaatttttacactggattggaatgtgggcaacatggcacagattaattttttgattaattttcagagtccgcgatgctaaaattcgatacgttcattcagcaagaatacaaacaacagagcagctcttctctgccacacagcacatacgtatacatacatcagttagcgtggaattatctgttcttgaaagtttgaagtaactcccatgcgaaaaagatctgatgtgctgttatagattcaggagtttaaaaaaaattgttcaacccatcagttattaaccagctctgcttcccaaattacccaaaacgaataacctcaagcccaccaaacgctgaagggtagtcagtcagagtgagaggcagtgtcggggtggtggttaggagggagggctgggtcacagcctgcctgggagaatattcgcttggctgcctacaagttgtatgagctcaggcaagtttcttaacttctgtttcttcatgtctaacttggagataatagtctcctcttcaaagggctgttctagtaacaatgagttaatataggtaagtccttaaaatagtattatttctcattattatataataatacttaatctctgcaccaggtcaagtttcttgcatcgtgtactattcaggatgtgctaggctacgctgcagaaacaactcccatctcagcagcttaacccaacagagttgatccctccaagcctcctccaagccaccaagaacatttggggatccaaggttcttctctgtggtggctctgccacccccttcaccctcggagccctccctgagtcctctatagccagccagtggtgagtgagccggggatcctgcagaagcaggaaacgaagtggtgcctgtcactgcttcccgtttcctgatggccacagctagtcagcagggatgggaaatggaatcatcccagagaaggggtccccaacccctgggccagtctgtggcctgtcaggaaccgggccacacagcaggaggtgagcggtgggcgagcaagcattaccgcctgagccccacctcctgtcagatcaacagcagtattggattctcacaggagcgtgaaccctattgtgaactgcgcatgcgagttacatgctccttgtaagtaggttacacgctccttataagactctaactaatgcctgatgacctgaggtgcaacagtttcatcccaaaaccatctccccgccgcctgccagccatgggaaagttgtcttccatgaaactggtcactggtgccaaaaaagttggggaccactgtcctagaggaaacgtgccctgggggaaaaatgcaagttcatggaactcacagtgatgctttcgccgaatatcacaacacattttcaggggaggaacatgttgcccagagaggccaaggtacttgctggaggtcacataatttgcatgaagccaagaattaaaatgacctcagaccccacatctctccttttccaaatttcctctacttgcacgtaggaagcaaaactccaggagggaagagagctcaggcactaaagccctgcgggtttgacttgcaaaaagcacccagatcatcactttacacacaaccccagcaactttatcttccagcctttagcatatgaaggaagtcagcaaaaaactgtctgctagaggcgggcacaccaaaagccatgagaagcaatgctgggcaagggaaggagatataagaactcaaacttagcggtctggggacatttggtgcaggatcaaacagtcctgtgcacaccggctgtccctgcaggcatcatctaacatgcttgtaattttttcttaggtttcaacatgtatagggggacatgcatgagttacgagacacatttatttctgcaaaatggccgtatcctggcaaagtggaccagatgacctgtcattgtcctttgaatgaaggacaaagatgatgacattggaagactttccacttggagatctggtttcctcatatgcaaaaccttatggtaatagctatggctcagcctactgattaaatgagacagtatgtgtgaattgcctgggacaatttgatataataaatgttgtttgcttatctttctctaggtcttgctttccttatctgaaaaatgggaatactattaccattcccagaggacacttgttgggattgaaaatgatggcatatttgtagaggtctgactcataacgactcacattctcatgttttattatgtgtgttttttaagaacctgggcctgagagtgaagagagcagtgtcacccttaatctctctggtccccgtttcactctgcctgcagggcgcaagctttgcttctctcctccccaatcttgctactgctaacagaaggtgcagccacccgccacccacctgcccatctctctgccagcctggccttgcctgtgtttgaccttctgccttagagctctgcttccaagtggaggaaggctgccttccagaggtttctattaagtacaaaaacaggacagttggcattcattcagcaagcatttaatggactcctattaagtgccagctgctgtggcaaagtgacaagtgacacagaccaggcaggtctccagccttctggacttcaggatagcaggagaaataagccctaaacaaggacacgcgcaggcgcagagaagacttccgattgtgaggctgctgagaagggtcaaaaatcgctgctatgagcaagaataaaaggaggcctgtcttagatggggagaaggtggggaagaaaggccttttgaggaagtaccctggaggcccgacccagcctgcagtcattttcttgcaggggtcagaggtgtggacgcacacggggtgctgaccagggaggagctgctgtccatccttctcatgagctccagggatgagtgtgaggggccaggggcagggaggtgatgtgtggccccactgcgaatcaacccctgccacgcttacaccctctctttctcctccatggggatccctggtcaccctcctgggcaacaggaaagattccagtcaacattttcttacacaaatatgctaatgaataaacaggaagtgtgagatggtgacaagataggatagggtgacatgacgggggacagcggacaggtagtgtgtggcatctcagagagggaacagggacaggtagcgtgcggcacctcagagagggaatggagctggctgttgagcggagacctgaaggaagcaaagaacaggtaaggacagtatcagaacggagttcctggcagaagaacgggcacacagacgtctggggtgggaagacgctggcttgctctgaaataacaaggaaaccagtgttgcctgcggaaatggccaaaggggaaaatggcatgattttgagaagccggcaggagcctggccaggccgcaagaggagtttagactgtgttgtaagaacaacgggaagtcatctaagtttaggagaggcatggcccaaatggcagttttacaggacccctctggcggttgagagggaaggggatggcaggggtggaggagtggacgtgggaagatttgtcaggaggctgcacagtcatccaggggagaggaggtggcgacgttagacaagggtggtgacagtgaaggacaggaatcccaattgccacgatgcagaatgccactggaaactggatatgtactcacgggcgccatgagcgagagcgctggctgaggagccgcagtcctcaagtcagagcctcagccctggggcctacgccactatgcatttgccacgtgactgttgtgccccctgtacccaagaccgaggctgactttgaggcataggaagggaatcagaggacagaaatgagctttctgaagtgcaagtgcaaagcagtttaaagaaaccactttgaagaagttccaatcaacagaggagccagctgtgatttcactgttgccttatgccgtggactgtactgtgtctccccaaaatttgtatgttgaagcactgaccttcaaggcgatggtatctggagatggggcctttggtaggtgacaggttgagaagaggtcacgagggtagagtcctcatgatgggatcagtgtcccaagaggagacaccagacaccccccccccccccgccacctaccaggtgaggacacagagagaaggcagccatcgtcaagccaggaagggctctcaccagaaaccagccatgcgggtgccttgatcatggactttccagcctccagaactgcgagaaaacaaatttctgttgcttgagccacccagtctgtaatgttttgttagggcagcctgagctaagatgccctgagcattagaaagggccctagggggacaagaaaaggggacttggacctggcagtgtaaaaattgcgctggtggtgccctgcacaggcctttcacacagttttaaaatagcaagtaacatctacgtgggtgtaagggtgctaattttcaacgtccttgacttcaactttaaaactttaataatataattgcggccaggtgcagtggctcatgcctgtaatcccagcactttgggaggccaaggcgggccgatcacctgaggtcgggagttcaagaccagcctgaccaacatgaagaaaccctgtctctactaaaaatacaaaattagccggaatggtggtgcatgcctgtaatcccagctactcgggaggttgaggcaggagagtcgcttgaacccaggaggcggaggttgcagtgagccaagatctcactgttgcactccagcctgggcaagaagagtgtaactccatttcaaaaaaaaaaaaaaaagaaaaaaaaaaccactttaataatataatcaatccttggtatctacaggggattggttccaggaccttctacagataccaaaatccacagatgctcaagtctcctatacaaaatggcatagaatttgcaaataacctatgcatatcttcctgtgtacttgaaatcatctctagattactgataacatctaatccaatataactgctatgtaaatagttgttatactgttttggctttatttgtattaatttttactgttgtacttttaaaaaatatatgtttgatctgtggtaggttgaatccatcatgcagaacccacggatatggaagactgaccacatatccctgccttaaaaagtcaaaccaggccgggcatggtggctcatgcctgtaatcccaacactttgggaggccaaggtgggcagatcacgaggtcaggagatcgagaccatcctggctaatgcggtgaaatcccgtctctactaaaaaaaaaaaaatacaaaaaattaacctggtgtggtggcaggtacctgtatagtctcagctactcgggaggctgaggcagaagaatagcgtgaacccgggaggtggagcttgcagtgagccgagattgcaccactgcattccagcctgggggacagagcaaaactccgtctcaaacaaaaacaaaaaacaaaagtcaaaccagaccatgaagcttataatgatgtcagggtgtcctctgctcttccctccttcaatctctgattctcaccacctagggataaatattctcaactctttttgttatttaacaactgaatatgcacacactgctatttcttgatttatagattttttttcttttttctgagatggagtctcactctgtcacccaggctggagtgcaatggtgcaatcttggctcactgcaacctccgcctcccgggttcaagcaattctcctgcctcagcctcccaagtagctgggactacaggcatgcgccaccacggctggctaatttttagtatttttagtagagacgggtttcacagctttagccaggatggtctcaatctcctgaccttgtgatccgcccacctcggcctcccaaagtgctaggactacaggcgtgagcctagccgatttttaaatgccttttagtcacttcttttcatggaaaaagaggatttagtgctcctcctccatcttgcttccccctgtgtcctcccagtgaactacataatcatggtggttaatcaatattccaggcttacattattcctattctgtaactcatgtttgctgatgggtcaagctacatatttttttccttgaataatttttcatttttgtttttcgtgtgcttaattttcctccctgtcactcattttcccccaaagctcagagctgtaaaccccttctgattatggccagacactttgtgctccaatttgatctctttctcaggcagattccagccatcatcagatgcttccttttattacttagcaaatccccttgcttttctctatcatgggtcctctctttgcaggattccatccattcctccttcctatcttgcttcttcattgtggtggaacacatcttccaggccctttctaagaaaggatggatgagaaataaaggtgcagttctgcaaatgttttcatcttaccctcacacttgattggtggtttggctgggtaaagacatctaggctgaaaataactttctctctgaattttgaaggcacggcttcattgacttctcatttccagccttgctgctgttgagcgttgaatattattctgcctcccatttctttgtatactgcttactttttgcccccttctctggtaacttttagattttctcttcatccaccatgtcttgaaatctcacagggatttaggtgggtcttccctggctttgcgggtggtaggtggacccttccaatctgaagagagccagactgcatctccccttccagcttcctcttactcctagaccatctttttgaatttagaaaccaagaatttggcttctttatgctctcatctatgaagaagtggttttcatcactaatagtaagagtgtaacaaacgaagcacattcattaattcctccacacacgtgtcttccacaggggagtggggagtaggagggtggtctccaagctccttcctcctcccctgtcaggctggctttttatttttatttttttttttttgagacagggtcttactctgttacccaggctggagtgcagtgacgccatctcagctcactgcagctgcaacctcctgggctccagcgatctccacacctaagcctcccgagtagcggagactacagacacgtatcaccacacctggctaatttttgtagagacagggtctcactatgttggccaggctggtcttgaactcctgagctcaagcgatcctcccgtctcggcctcccaaagtgctgggatcacatgcatgagctacagtgccctgcgaggccggctgttgaccacacttacatcctcaactccgcccacctttgatggacagcatattagtcagcctgggctgccataacaacagaaatggtttaaacaacagaaattaattttctcactgttctggagactgggagtcaaaggtcaaggtgctagcaggctttgtttcttctgaggcctctctagatgaccaccttctgtgtcctcacatggccatccctctgcgcctgtccacctctggggtctctctgcatgtctgagtctcgtcttctttgagaacacctggtaggttgaattagggcccatcctaatggcctcatttttaacgtaatcacctctttaaaggccccgtctccaaatacagtcatattctgaggcaccgggggttcgaacttcaacatgtgagtttgggggaacacagttcagtccctgtagatggggtgctcaataatgattagaaaccccacggtgctggttaaatctaaccactggttcatgggccaggtgaaaggaaacagacgcaaatcaggaaggattctgtgtgagtgcacagtagccaggtcactcttctgggagggtattgcaaagtcgaaacgcggcatgctccacctccagctcaccaccgtccagcccaggaaatccacaggtctttgcaggtgccatgcacgctatgctgacacagcacaagggacacttactgataggtcctgggaggacactgaaggacaggactgcctcccgcatctccacagtgactcttggccacaccatttgttacatttcctgggtgccttcctaaacctccaagctgccctggaatcccttgactcccatctacaatatattattagtataaagggagtcgacgaactcacaaccacaagctgcaaattccagtgacgtcagggtcaggcagataacataagcaaaggaaggagacagagggacggacatatgagagagagtgatgaggactggggctaagtggagagggactgccctgccaaaaagcatttaaattcaatgcgtgttggaacaccatcccagccaaaaaacaaaacaaaacaaaaaaaaaccaaccaaacacaaaccaaccaacaaaaccaagtttgctgaccaaatgcagcctccaagcatctagttggtgatctccactgaggatatatggttaagaggacaggctttgaagacacagacctgattttgaatttcactgtttctgtgaaacagtctggtccaaatgttagagatgtgtgagaaatatatgaaataaagcatgtagtgcttagtgcagtcctgacacatagcaagtgctaagttaatagtagctattaatattactgtggtaaataagaaagtagtgacgtgattctaagccttcacttctcaggaacagtgcggagagtactcacgtgtggagtggtggtgcctcctggtggtcataattaggaactgcagagcagtgtagcaggcctaacagaatgattaggagccaagagggctaatttacggtcagacaatgggtttgactccagttctgccatctgcgagtaggtgacacaggtcattcacctccatgcttagcctccatattcaactgccctacacctacaaccccacggagtggctctgacaacttaacaagacaatatgatatcacttttaagggctttactgcatactaagtgctacgatcctaggatgatcctggcatgatgtcagaactcagaacaccgcagcaccacactgccaacatccttctctcttgtgagaaggtgaaacaggtgggtccccagttgttacttattttttcttttattgggtggcaatgagaaggggttactctggaccggagcccctgaccagaaaaatagatctgctgtatcacctgaaattcactggagcaaaatattcctttgagttatgcattgctctatccagacttctcttttaaaccggaagttcccccagaagggtgactgtattagttccaaatacccacatgagcatgagtttatcagctgctcccctccctgacaggaggaggggactgggggacactttgtgctgtcattacctccgtttgggacccctgccccagtcacagccttctgcccacttgccattgctggcctacagagctggcttcctgcctgcctgtgatgggagaccctgccttcaagctggctgagttgtccccaggaggtagagaaccagaggccaggcctgacctcagactgcagggtcccctctcccacggccctctggggaagctccccgcacccaggcctcctcagccctgcccctcctccccaggtcctgagctcttcttccagcaaacagcggcagcatctgcctggaaacacaggaaaggtgcctccacttgtatcctttcctgccgccagatggagaaataaaaacaggaataacagatcccactgccagagcacgtgtgctggggcctctgctgggcactgcagacccattggctcatttcatcatctcgccaaccccatgtgatagatgcaatgattgttcacatttcacagatgagaaaactgaggctcagaagggtgagtgagttgccgaaggtcacagagcttgacagcgggggagcctgggtgggaaccaggcagaccaatgcctgacccttcaccatggtgcaatgtttacccaatgggaagccatcccttccacctccaaatccaagaggctgctgctgaccaagatccagcccattaccctactgtcagattgatcacatgagcatgaattatcaaactgacactctgacccaccctgacaaatgtcactggccaaatgtgtgactggtcataactgacagatggacagacatttggcttgggaaagctaggacctggctaatgtttgcttttaaaagatcttaattttttttttcattttaaattgaggtataatttacagcctctaaaatgcccacattttagattgatgtacagttgatgtggttttgttttcttgtttttgagatggagggttgcgtcttgctctgttgcccaggctggaacgtagtggcgtgatgttggctcactgcaacctccacctcctggggtcaagggattctcctgcctcagcctcccgagtagcagggattacaggcatgcaccaccacacctggctaatttttgtatttttagtagacatggggtttcaccatgttggttaggctggtcttcaactcctgacctcaggcgattggcccacctcagcctctcaagtgctgggattacaggtgtgcgccaccccgcctggccagattgatgagtttgatacacgtgtatgtcccagtcaagctacaggacattcctgtcaccctagaaatctctcacacccctttccagccaacccctgcccccactgctctaggcagccactgctctgatttctgtcactacagctaggttttgcctcttctagaatttcatacaaatggaagtactgggtatgtacatatttatgtgtctgcttccttcacttaatggcttttaagttcatccatgttgttccctgcatgtctttaatttcttcctttttgtccctgaacaggattccattttaagcgatcgggcacagtttgtttttctgttatcctgttgagagtcatgtgtgttgtttctaggttttgacaattatgcctaaagctgctatgaacattcttgtacaagtctttttgcacatatgttttcatttattttgggtaaatacgtgggagtttaaatgcttgatcacagggtaggtatatgtttaacttcaaaataaaacctgtcaaactgtttccccaagtgggtgtatgatctggtcaattaattttaactactcatctggtgagccagaactacctaccaactgacttcctttccagacaaataccatgtgactcatgagctgggcttccagggactagaattgttcctggggacaggctgggtgctgaccagaagcaaaggatgacatttgagaagttacctggctggctgcccgccttctggggcctgtgctgcgcactgcagacccacggtctcccttctgccccagctcctcttgcaggcttctgaggcaaaagaacttctgccaggccaggcatcccaactccctctaaagaaaccctcagcaagatgctcattcggtccctcacatcagtgccaggtgaagagaacgtgaccggggctatcctgaggctgcgggtggccagggacgtaggagggagaaggcaggagctctctaggccagactagagttccatgctcaggcgtgaggctgtacagccctatggtacacctcagatctgggagagggaattatctcacctgtgagagtgtggacaatactgtcaatagcagctcagccctggcctcatgtcagttatcaattgctgtgtaatgaaggatccccaagcttacgggtcaaaatgattattcattctatctcacaaacctgtgggttgactagatggctctcctgctccacgtggttggctagggcgacaggacactggagctggagcatcaaagacggcttctctccatatccagagctcaactgagatgactgaaacatctggggttgactgggcgtctctcttctttctccatccatgtggcctgtccatggagctagcttgggctccctcatcacatggtggtcttaggggcatcaggcttttttttttttttttttttgagatagggtctcaccttgtcacccaggctagcatgcagtggcatgatcacgactcactgcagcctcgacctccctgggttcaggtgatcctcccacctcaacctcctgagtagctgggactacaggcacacgccaccatgtctggctaatttttctatttttttttttttttgtaaaggatgggtctcactatgttgtccaggctggtcttgaactcctgggttcaagtgattcacccacctcagcctcacaaagtgctgggattacaccatgaccagctgaattggacttcttaacatggtgtggcaagctgaacagtctacccccaaaattcatatctgcccagaacctcaaaatacgacctaatgtatggttgtatatgacctcatcttaactagttatatctgcagagatgagaacaaagtcttcacagatgttaactagttaagatgaggtcatactggattaggttaagccctaaatccaacatcagatgtccttctaaggaggttggaagacaaacagatacacacagggacgaaggccatgtgaagatagaggaggagactagaattatgccaacaccagccatgaaatgccaaggactgccaggagtcaagagacaggcatggaatagattctcccctcagagcctccagaaggacccagccctgccaacaccttgattttggccttctagcctccagaactgagacagaatacatttctgttgccttaagctgcccagtttgtggtaccttgttatggcagtgctgggaaactcacttgcatggtggctggggcctgaagatgcagcagaagctaacggcgtcttaaaggctgatcccagaactgacggagcatcaccccgccatgcttcatccggcaaggcagggcctctcagcgtaggccccattgacactggaatggtctcactctgtttgcggagggcagaggaattggaggaggttgctctgtgttccaggatgtttagtggaatctctggcttccactcattgtcagtagcacccccaccaggcccaacaactaaaagtgtccccagagattgcccaatgtcccctggaggacaaagccatcctggattgagaaccactgggttaaagtaagtaacaggatcagcacagctcccagggcaggggctgtataagcgtgggaacggcagcaggctccctgagggccaccaatgggacagtctcccgcttcaggatcacttggaacttgccttgagatttgcaggacacaacccacaatccccagatcttttttttttttcttagagacagaggttcactctgttgctcaggctggagtgcagtggtgcaatcatggctcactgcaggcttgaactcccaggctcaagggaggcctcagcctcctgagtagctgggactacaggcacatgccaatgcatgcccggctaatttttatttttatttttgtagagatgggggtcttgcaatgttgcccagacttgtctcaaactccagggatcaagtgatcctcctgccactcagagtgctgggatgacaggtatgagccacgtgcctggccccccagaaaccttgaatcccttgtgttctaccttatgaagtgagtcccaggtgggggtcagaagctggcatccaggtccaggaccccatggagcgttacctgtgactttggatgcttctgcacacttgttgccaacttgagatgctgaattcaaaccaccacagagctgctccccgtaccaggtgagaagtgtgggaaaatggtttgaagccacgtggtttgccctgggcagtctaacgggcaagacatgaatgcacatgtgtctaggttgggcactgcaaaaaaagacgccacatctaagggcaacagggcaaacatactaacttgcatgagtggcagaggtaaagattcatgggctcccgcctgagtcctggagcagcacaggagagcccctgcccacctaaaccagtgctggcagccccagccatgccacaggcttgggagaacacgttcaccctgtgctgcaccctccgctgcccaaccccaaacctacattgtggcctcggtgtggcaggctgctggcgggagcacacgcggcatctggggtagctgtgtgtgaagcacagagcgtggcacctgtgtgtgcagcggagttcgcctgggaggaagccacatagcatttgcctgatttcttgtatgttgcatacacgctggatgctgatttagaagggctgtttttggttggtttgtttttaaaggatacattttcacatctccatctctgtagccatgacccaaaacaaaatggaacgtttccatcaccccaatagttcccacgtgcccttgttcctcagtgatttcacccacctccctccacaccacctccccaggtaaccaccaccctaactgttattgccataaactgagtttgcctcctgttctatcgttttatataaatggactcatatatggttatcttttctgtctggcttttcttcagcaccattttacgagattcattcctgcagctgtgtatagccatcccttgactttttttttttgcaaccaagtcttgctctgttgcccaggctggagtgcagtggtgcgatcctggctcactgcaacctccaccttcccagtgcaagccattctcctgcctcagcctcccgagtagctgggattacaggcttacaccatcatgcctggcaagtttttttgtattttttagtagagatggggtttcaccatgttgcccaggctgatctctaactcctaggctcaagcaatccacccgcctcagcctcccaaatcccttgtactttttattggtgtgcaatatgataaaaagaagcttggtttatgaaactgcagttcctaactggatgctactgtttaaggcccagtgccagagcccctaccccctccttctctccttccccgaactccgtctttacactttggccatgaccactgtcacccaattcacctagagtgagcgtcccattccgcctcagtcagcccccagggccacctgtgattgttcaggctgtgcaatgccatcctgactccaacaatccctgggggagaggtgacggatatcctaactaccctgcttcgattatgatacatggtatgcatgtaccaaaatatcacatgtaccccataaatattgtatatcaaagatggagaattactgtaaaaaacaatgaccggaggaagagaagcctttttccagtttacaccctggccgtgtctggctggcagcagattctccacttcccacagccagagccttttaaaaactggtttggccccaatgccattgctgcagctggaacgggtacagctggctcatctaggatagaaagtgcatggccagctttgtgtgaaaggagaggaaactctccccctgcacgtagctgctgctgctggattccaaattccttgtcctgtcctcctatcttccccatatcctgccccaacttatccttgaggcactgttccactgcagccctgcccactcccgccagagccatgggcacaccagccaccacccttccagggaatgcagtgcggcagagcacataggccacatcgctggccgttcagccacctcacgcagcctcaacttcctcatttgtaaaatgggcgtaatgacagcaactagctcatttggtgggaaaacataagatcatctaggtaaagtcctggcacagtgcctggtgcacaagtcgtcactgaatattaccttttggttgatctgtgcaggacagttccccaggcggccttgggccaacccatcaacccagttctccttgcctgccccccacccctgcccacctcccccgcaactttttttttgagacagaatctcactctgtcacccaggctggagtgcggttgtgtgatcttagctcactgtgcaacctccacctcctgggttcaagcgattctcctgcctcagcttcccaagtagctgggattacagatgtgtgccaccacacctggctaatttttgtatttttagtagagttggggttacaccatgttggccaggctggccacgaacgcctgacttcaagcgatccacccgccttggcctcctgaagtgctgggattacaggcgtgagccacaatgcccagctacccacttttttgcttaaggttctcaggactaacttggcgtgtgctgggaatgcaatatcctgagatacgcaggaactggctacaacagcccaggctctattcctctttcccctacaaacggggtatccttaggtgttttagcccagcctatcgtgttgcccctgaagtatacaacctgggctgggctgtcttttggggtatctcagatgtggtacaattggggcacacacacagagactccattcaccccgggcagatttcctgagcctgggggactggcttacaatgaatcccaggcttctgttgtcccttgctgcctgtctgtaagtaataaacccatttcatttcatgtaacttgtgtacgtgggtgttctatctcaccagattcaggcaagctgctcaccagcacacagaaactctgctccacaacctgggatctagttgaaactccggcactagtgccaatttgagagggctcaatgtctgggtaaaaatacacttctacccctgtccttcagtttccccatctataaaagagatggtatgcctgtaatcccagcaccttgggaggccgaggtggatggatcacttgagaccaggagttcaggaccagcctggccaacatggcaaaacctcatccctactaaaaatacaaaaattagccaggtgtggtagtgcatgcctgtggtacaggtaacccataaagtcacttccaaacctcacattctataaagctgtgattcccagaggctgagagctcaccaccaccttttttgtactttcattttaaatatttaaatcttcaatccatttgcgagtgactttagtgcaaagtatgagccatggatctaagtttactttttccccaaatggttgcccagttgtctctttgctatgtattaaaggttccatttcacctttttgagtgacactcctttaattagaaaattgggtccatttctggattttaaaaatcttattccattgatccattgattttagtgtagatttttaatacaatgaagtatttttgtgggtgaagcaacctctagtttctttctgaaatattttagatgtataaacagtacagagagaatataactagcacctaggcaacctccaccaatcttaaacttcagtcagaactcaactccccacacacagttatagtcaaagttcccatgtgcttcattctgccagtttccatcctcctctgaaagtagctgcttcgagtttgtttttttaatcatttccattatttaaacacaaatgtaaatatccacgatatataatattgctttatgtgttttagaattttatgtaaatttctcatactataaatatcattttccacttacaggtttttgagatatatgtaatgttggtatatgtagcttcttattctcatggctctaagaattaaatgagataatccttgtatgcaattagaagtgtctggaatgtgataaacaaggttagctgtcattatcaatgtcactaatcattatttttattatcaccattcccaccaaagggatcagaggttcacacatgacattgttgaggagcagcaaaatggagccacgatttcttttaggataacaggagccattttccctgctctgaggtatgtttggatggaaacattgggctccttgtcagctgttccctggtgctgtgcacagcttgcaggaacggctctgattttgtttaatgactctgacaagaacgccagacttggccatgtgacttgctctagccaatgagacagcagcaaacattatgcaagcagaaacttgaaaagtgcttgctcattggccttgccctctcactgctcttggtcagacccatcaccatgagaacaagcccatgctagcctgttggatgatgagagaccctgcagagaaaaggaaggtgccccagctgacatcagaaagccctgtgcccatccagcagccaacttcagatgtacgagtgagttccagctgagataaaccaaacttggcgaaatcgcagaactgcccacatgaacctaccccaaactgccatcccacagagctgtgagctcaataaatagttgttgtattaagtcacagagtctggggtggtttgttgtgctgcataagctagctgatacacctggttatctgacatctccagcaattactgacctgtatttgcagacttaactcttggttacatgaccagaaaacaatattccacgtgcatgaaccacaatccacaagagacaggctccctttcagaaacatcaaacgatgttcaacatttggcaggtctgaaaagctctcatccataccatgagtgtataaaacatgccttgacccatgataatcaccaaggggcactttctgggggttggtgctatcccccccaaatagcagactcttcccaagggaatcacaggtgatgtataggtgtttctaactggtcctaatcccaaatccatgtctgaaacctcaccttatacctacatattaacttcatgggtgcaaacaccacacctggtcataccagaaaccagagttcccaaaaagggtaaatgtccttctgtacacagcaaaggcatgttgggccatgcctagaggaaaaggaggcagaggctgcagagctggaagctcagctgttttgaggccctgggctgacagatctttgtccacagccttgccaggaaatgccccacagtcccacatttggaagtgaacaagctggaagggtgattttccaactggacacagctggtgacgatcaagatagtgaccctggataactgccctcagactctgcaaggccaattctcaccataggtggagttatttgcctgcataagcgatggtcaggccctctctcctgcccccagacacagaggagggaccatgcgcttcctgacattgtggcttcaaatgccacaaccacaagggccatccacttagggacaacattggtgtctgcctcaggaagtcccttcccactccacctgcctgggaacacgccctctgatgtgacagcttctggactcatgttataaacaagtccttttttaagggcctgaaacattggaatagaaccaccaccaaccctggaaaaaaaatgcaaatccaaaataccaagtactatacaaaggtgctctaattattcttggttcaaaatgattcacaagaggaaagggaaccgactccgtatgtacgcgtgtctatctgagaaagaataagagacgctttctctatgcgcatgcttcccaaaaattaatgaatgaaatctctcatcctagtcctttacagatttatctaaggtttcttcctgtgtttgaattcctctattagaaaaaaattaatcaaagcaatacatccctatggctagaaattaaatatttacggacctattatagaaagcagtaatttgccaccccctctctccacaccaacgcaactctcacagtgtaattcctgatgactacctagtataactctaagtaatatatttataccattctttcttgatttatcagctctgacattacttcttcccaaattcctctaaaggttttgaaagattactttgattccaccccccccttagaaacatcacacctttaaacaatgcacttaaacctcaattaattgagcttttctattataacttttgtctccctactgctattgatgaacttaactcccttctacctccccacccttctttcattttatacctttctatgtctgttagctgcatcataactttcacctgtaattaactccttaattgccaggcactattctctgtactggggatacagccttcgagaagacaataacattccttctgtcatggaaatgaccctttaagggaagcagagaataaaaatataaggatgtgcagaagataatttctgagaatgaaaacacactggatataaacaaacagtcacgtgcaagagactatacatagaagcaggaagctcaaaactaactgggggccgggtgtggtggctcactcctataatcccatcattctgggaggccgaggcagatggatcacctgaggtcaggagttcgagaccagcctggccaacatggtgaaactccatctctactttaaaaatagaaaaaggtagctggccatggtggcacgtgcctgtaatcccagctactcaggaggctgaggcaggagaatcacttgaacccgggaggcagaggttgcagggaggcagagatggtgccactgcactccagcctgagtgacagagtgagactgcctcaaacaaacaaacaaaacacctaactggggaggtcacagaaggtctcgcccagcagacggcacttgagctgaagccctgtgaatcttaaggttgtccagtctgactgtgggagcagacactgttcctggtcctgagggagcatgtcttcccccggtctcacatagttccatctcacacatgcactgatcagcaatctgccaagtaagggagacactctgcaaacacctggggtgctgtgtgtaattctcttctctctgggactctgtcctgagaaatctgcctaccttggttttcccaggctctcagccagtgtcctcaactcacggattctgccaagttccctgtctcggcactgcgacctgaaaactcactgggtcaattgtagactgtattagcctgggctgccacgacaaaagatcacagacagggcggcttcaacaacagacattatgctcttccacttctggaggctggaagtccatcatcaagatgacagcaaattcagtttctgttgagaacctgccccctgctggtaaatgtccttccatgactttactctgtaaaaagtctttactctgtaaaaagtctttactctgtaaagtctgtctttactctgtaaagtctgtctttactctgtaaagtctttactctgtgcttgcactggggaaaggagagatttttagtgtgtgcgtgtgtgttttagttaaagaggcagggtctctctcagttgcctaggctggtctcaaactcctgggctcaagcaattctcccatctcagcctcccaaagtgcttggattataggcgtgagccactatgcctcacctcttccttttcttataaggacaccaatcctatctgactagggtcccacacttatgacctcatttaaccttaattacttccctgaagaccctatctccaaatatatttatattgaaggttaggacttcaacatatgaattaaggtgggaggggcacaattctgtccataaccgggctcactccatttgtctcccacttctcagcgatcactgtcctttgttgatcgatgtacagtgtcttgcaaaccattgtttagtcccttcttttgttgatccagaagggaagttacctcttggctggtcttagattttcacatttatatgcataaaatagtctcaatatttttttcgtttttgttttatggtcatttgcagtattttgtatgttcctgcttttttattacactagctagtattttttttcatagaaacaattcccagttctactatttcctttctcttttctgattattctaggtacttgtgtttattaattctcccttccacatcttttcattgatatttgttttgttttgtttttgagacagagtttcgctctgtcacccaggctggaatgcagcggcgcaatctcggcttactgcaacctccacctcctgggctcaagcgattctcctgcctcagcctgccaagtagctgggattacaggcatccaccaccatgcccaggtaatttttatatttttggtagagacggggtttcaccttgttggccaggctggtctcaaactcctgacctcaagtgatccacccacctcggcctcccaaagcgctgggattacaggtgtgagtcactgcacctggcccttttcattgttatttttattgttgtccatttcttaactgtgagttgaaaattaaacttttttctttgtaatatatttattgctatacctattcaatggtaggagttcttagctaagcactgtattggctgtgtcccccagtgattctggtatgtttttattcataataaagcttttaatttcaataaaacatacatccagaaaatgcacacgtcttgagacagctgacaaacctattacaaagtgaatatactcatgaaaccaacacctggatcaaaaataggacattgccagcatcctaaaaattcccactgcgccacttcccaatatccctccatcccccaagcaacttctaacacaatagattacgaatgtttttgaacattatgtaagtgatatcatgacggagtctcttaggtctgtctagtttcacccagcattatgtttgtataatttgtccatgtttctgcacgtagaagaaaaatctgttacaatgtttttgttatgactgaaataaatagaaaatgcaaaactgctccttaaaatctgttattacaaatgttccaagcagatttcatgatttggtgaagaggttgaatagcttacccaataatatgcaacagattaaagagaggaagtactccaaagtcacatcacaaaaatagatgcctacataagtggaaataaactaaaaatttaataattgacataacctttacacaatctgtattattttgactttcaaaaaattgctaaaatgaagtctacatttatcaagtttgctcatgcagggattatgcacaataaacatacatccccttggttaggcatggtggctcatgcctataatcccagcactttgggaggccaaggcaggcagatcacttgaggtcaggagttcaagaccagcctggccaacatggtgaaaccccatctccactaaaaacacaaaaattagctgggcatggtggcaggcgcctgtaatcccagctactcgggagggtgaggcaagagaatcacctgaactcaggggcggatgttgcagtgagccgcgatggtgccactgcactctagcctgggcaacagagtgaaactccatctcaaaaaaaaataaataaaataaaacaaaaataaaataaacatacatcctctttatacaatgcttttggagagagactgatcgtatgatgcaaatcactccagactgggaataacagttaaatttgagtctctgtccatcagtgataaacaagatgaagttaattagattcaaatattttattttcaagcataaaataggacattcacaagacacgctgaggttttttttctagctctaaaacataacatgatcctaaatatatttagacaaccaaaaatgatatcagagacatgagaaaatctggcaagatagtgatttcaagaggtggacccagctcaccctctgtattcattttctactattttactattaaatttcctggtattaaaaattaccaaaacgtagtggattaaaacaacacaaatgtcttaccttaccttattatctcatagttttgtgggccagagtccagcaagggtctcactgggctgagattaaggtgtcagcagggccgtgtgcctttcaggaagctgtaggagggtatctgcttcctggcctcttccagcctccagagacccccttcctccatcttcaaagccggcaacatagtgtgtaggtgaccctacttccatcaccacatccctttctccgaccgcagctgccactggttgtctgctcttaaggagccgtgtgattagattggatccacctggataatccaggctactcgccccaactcaaggacagatgatagcaactttagtcaattcccttttgccatgcaaggtaacatgctcacaggtgctggggactaggacgtggacattgtattaggccattcttgccttgctataaaggaacacctgagactgggtaatttacaagaaaagaggtttaattggctcatggttctataggtttacagtttcaaagatggcatcagcatctatccagcttctggggaggctttgagggggcttttactcatggcggaagatgaagggaagcagtctgttacatggtgacagcaggagaaagagagggaggtggagtgggagggaggggggtgccacacacctttaaacaatcagatcttctgataactcactcactatcaccaggacagcaccctcttttccacaatcttgatggagtaactccaattctagagctagcaggttagtgaagcttagaaagggcatttgattttgtttttaatcatccctatccagctcctgtcctgttccccaaatctccagggctcaaagcctagatgatcctttatttcctataaaacaaaacatgcgatggcaaaagctcatgtctccaccaggccttaagaccaaggacttcctgggctccctgagggagtctgctcagtggatgcttttgaattatctataccagggactggcaaaccttttctgtaagggacagaaaggaaatattttaggctttgcgggccacatggtatctatcacaactattctgttaccagatggagggccttgagtgtgagttgtccgggtcctcagtgttttgaacaaagaattggacaaaacacacaaagtgacaaacgaatgaaacaaagcaacaaagcagtgaaagcagggaatgatattttattttattcatttatttatttttgagacagagtctcactctgtcgcccaggctggagtgcagtggtgtgatcttggctcactgcaacctctgcctcctgggctcacgccattctccgaaagcgagatttattaaagtggaaagcgctccacaggtgggagtgggcccaagcaagcagctcacgggcctggttacgaagttttctgggttttaacgactccttttgagggccctatcggctacaaaaatgagtaccaaactcatgtcttgctttatagaaaataaaggatcatctaggctttggatcctggagatttggggaacaggacaggagccggatgtcaggtccacaactacgccaaatgtcctgcttggggtcaggttcgggcccatactgaggtccaaggggagtgggcggatgggcagataggtgaaaaacactgggcgggtgccataggcaggtgaaatgtagttttattcagcagctctctcatcaacagctcttacacactcttctctcatcagtagttttctcacaccgtccgccctgttttagctgcttgagtgggctgctcccatacaccgctgtgctgccggctctcccttgccttcagggtcagcagcttaactctttctctgggcacaagctggttccgggctccccactgcccacctgcaagacggacagctttggctctctcttcctctgggcaccagcgcacccaaccacgtcaagccatgcccaagagccaagcccagccatgtccccagagccccgtgcagtgtcagcagggcagtcataccttttacagacaatagtggcgtagagccaagtatgaacttacacaaacagttatataacaagtggaggtgtgagcctgcaccccaaccctgctgagtcatgcaggcctggatgtctgcctcggcctattccttgaccaaagcacatccatgtgaaggaaataatgtatacagtggtccatttccaagataaagtgccttgaattggcttaggtcagcaaactacagaagaaacaagatatactaggcccctgcttggatagccgatgcctgcttgtcggcctctcccttctccccttcctcccttgcttagttgccctcactcaaaccaaagacatttagtctaaaatgaaagtttactagcctgcaaaatagctcactttgtcagttcttatcggcctgcccagctacttaggtcattaggtcataagacaaatgcttaaaaagcccctgagctaactaggattgcaatacattgtgggctgcaacaaaatgccacaagacaaccctaaaaaagaacacctaaagcccctacccaccatcactaggcaaagtccgggaagagtgtgaccccacagtactcagcctttgaggaaccggtggagagacctgtgcactagaggatgaattgcttgttgtgactgcgctgggtgtgcctgctcattagacacccagtcttgcaagaccgtcattaaaagtctcactttcactattctctgggtctctaagtccattcttgagttcgaacgcatgaatttgttcctcacacatgtaccttacactggatagggctgattaaaaacaaaatcaaatacaccttctaagcttcactttcctgctagctctagagttggagttactccatcaagattgtggaagagagtgtggtaggaagaataatggcaccgctgaagatgtccattctttatctggatgaaggatttggcccatggctaattaaagctgaagtgaattggtccgcagtcatctggagacggagtggatcggcaccctacgcagatggggggatggctagcacttggcccacagccaatccaaggcactttcctttccatctgagacatggtggaaggttgtatggagagtaacctttgattctttgttatcccagcatggcaagatggagtttttccttttggcttagcttttggaagtgggtgttaattggtcttagagtccctgcccccagacccaagtgtttcccttttgatccagccttaggaagtcagcacacattggccttaagttgcctggtccaaaccctattctcctgcctcagttcaatctgtcaatatgaaggttgaaaatacatcattaaatgagcatagctgtgggccaatagaactttattcataacactgaaatgtgaattttacatgatttttcacatcatgaactagtcttcctttgtttcccaccctaaccatttaaaacagtaaaaaccagctgggcatggtggctcatgcctttaaccccagtactttgggaggccaaggtgggcggatcacttgaggccaggagttcgagaccagcctggccaacatggtgaaaccctgtctttactaaaaatacaaaaattatctgggcatgatgactcatgcctgtgatcccagctactcaggaggctggggcaggagaagtgcttgaacccgggagctggaggttgcagtgagccaagatcccaccactgcactccagcctgggtgacagagtgatactctgtttcaaaaatacatacatacatacatacatacatacatacatacatacatacatatgtaaaaactgttcttagctcaaagaccaaaaaaaaaaacaaatcagacatcgggccagattttgcccaccagccatgttttgccagcctctgatattcacaaagggctgtcttctgtctgctgagtgtggcgttatttggctcaataccatggacctgaagcaggcaggactcaaatctctgcagctgggagagtttttaaatgcagctacaaagttttcctgaatattagatatatttgcaagttgccagcttgttagataagcactcacagggcgttctgctcgctgctagtttgccctgatcaacacttttatgtcgtgacctataagaaagctcagagaacctagtggccaggaatagcaaaggaaaatagttacgagaggaggtaattaccctctctaccaccaagagatagaggatggagggtggaggttaaaagggtgggccctggagtcacggtaaattactcggggtaaatcatgtaaattttctggccaccagtttcctcatctgcataatagggatgatgatagtgtctgtctaattatatcgttgataggattacatgttatcatgcatttaaaagacttagtgtctgcttgttagtttttaagtggttggttttcactacctccactattaactaccctggcataaaaaagcaaaaggaaaaagaaaggcaatttgtacaattaactcctaaagaaggtgaaagagttagtggaagagatgagaaaactttaataacaaataaataagaactttcaagaaaatgcaatttgggtttgatgactttctggaagtaaaatgtttgaaaaattaaaagaaatatccaatagttggactggaataaatgggaatcatggtatagtaagtgataggacatctcctcatagggatgaaagaacaggtagaccaggggaagggaggacatttaggaggcaggtgcaaaacaccccacgagaatccaggctgcagggaaatacagaattagaagagttggacaattaatcctatttgagaggataagttcaatgagctgaagactgatttttttttttttttttttgagacagggtcttgctctgttacccaggctggagtgcagtggtgcaatctcggttcactgcaacctctgcctccaggttcaagcacttctgcctcagatttccaagtagctgggtttacaggtgcaccacctgtaatatgccaccgcacctggctaattttcacatttttagtagagatagggtttcacaatgttggtcaggctggtctcgaactcctgacctcaagtgatctgcccacctcccaaagtgctgggattagaggcacgagccactgcacctggccggaagtctcaaattttgacaccgaaagagcacgttgtttccaggactggattaattcctaaagaactcaccttagacacatgctctgtttaaattctgaagactgaatcttaggagaaaatctgacaagacttcagagggaaagaaaagaagagtttactcacaaaactaaaagaataagtaatggggaaaggactccctattgaataaatggtgctggaataactgactaatcgtatgcaaaagattgaaactggacccctttcttacactgtatacaaaaatcaactcaagatggattaaagacttaaatgtaaaacctaaaactataaaaacccaggaagataacctgggaaatatcattctgtacatagcttctcgcaaagatttcatgttgaagactccaaaaacaattgcaacaaaaacagaaattgacaaatgggacctaatcaaactaaagagctctgtacagcaaaaagatattgtcaacagagtaaatggaaaacctacagaatgggagaaaatatctgcaaactatacctccaacaaaagtctaatatccagaaactatacggaacttaaacaaattaacaagcaaaaaacaaccccgttaaaaagtgggcaaaagatatgaacatttttcaaaagaagacatacacatggccagcaagcatatgaaaaaatgctcaccattactaatcactagagaaatgtaaatcaaaaccacaatgagataccatttcacaccaatcagaatggttattattaaaaagtcaaaaaataacagatgctggagaggttgcagagaaaagagaatacttatacactgctggtgggaatgtaaattagttcagccattgtggaaagcagtttggcgacttgtcaaagaacttaaaacagaagtactattcaacccagcaatcctattattggatacatacccaaaggcatatatataaatcattctaccataaagacacatgcacatatatgttcattgcagcactatccacaatagcaaagacatggaatcaacttaaatgcccatcagtggtagactggataaagaaaatgtgatacctatatgccatggaatactacacagccaaaaaaaagaacaagattatgttctttgcagcaacatggatggagctggaggccattaatctaagtagacttaacacaggaacagaaaaccaaataccatgtgttcttacttatcagtaagagccaaatattgaatacacatgaacacaaaggagggggcaagagttgctggggcctacctgagggtggaagttgggaggagggtaaggataaaaaaattacatatcaggtcctatgcttattacccgggggatgaaacgacctctacaccaaacccccatgacatgcaatttacctatataacaaatctacatgtgtacctctgaacctaaaataaaagtgtaaagaaagaaattgtatacctttaaagcttattcacaattatgactctcaatatattagcaatatattaaacatatttgtttttcaataatacatatgtagaaattaataatatctattttcacattcaatattgtgcattccttgcactgcttgcccctgattttggagattaatgctgcagaaaatatagagccaaaaaaggcataggtaagcaacagagctgcatgatcgcatctgtattctagaagtccactagaagagtggaggaggacaaattcctagaaagacacaaactaccaaaactgactcaagaagaaatagataacctaagtagacctataaaaagtaaagaggttgaattactaatgtttaaacttcccataaagattcaatctttgtaggtcacatgcttctaggaagtcatccatttcttctaggttacataacttccaggctacataacaaaggaaataattatcagactgaagaaacaatccatgaattgagagaaaatatttgcaaactataaatctgaaaaggggctgatatccaaagtatataaggaattcaaaaactcaactgcaggaaaacaaataacccaattaaaaatgagcaaaggttctgaacaggcatttcactaaagattagatacaattgcccaacagatacatgacaaaatactcaacatctctaatcattaggaaaatgcacattaaaaccataatgagatttcacctcacacctgttggaatggctattaccaaacagatgagtgacaagtgttggtgaagatgtgaagagatgggaacccttgtgtactcttggtgggaatgtaaataagtacagccttttggaaaacaccttgaagattcctcaaaaaactgaaagaacacctttgtcctctaacaaaggtgtcattgtgaggtccatcctctgtagtcaaggctctctgggtctgtgaatttatttaggtctgggaactaggtatgaagccgtggctttcttttgcagtgactcaagttagacttttgcctatcaaacctacagtttgtccagtaatactttagcagatggtccagctatttcatctccccaaggataccaggattgattagctcctggtaaaaatccctgcatgtcaaaccttctgattgctattggttcacgttgcccatacagaacttgcactcaccttgtctgtgaaagttaagtactgccacttaccttctaccaccttgagatcttttcactcttattgaaatcaggaaaaaatagtttttacaacatagtggtgccaattatgagccattaatgagctgtgtaacaacctgggaatccaggtgctatggtttgaatgctgctgtccccctcaaactcatatgttgaagcctcattgccaatgtgacaatattaggaggtggggcttttgggagtgcttaggtcatgagggtttcaccctcattaatgggattagtgcccttatgaaaggggccacagagagctgccttgccccttccaccatgtgaggacacagagcgaaggtgccatctgagagccagaaagcagtccctccccagatatcacatctgttggtgccttgatcttggacttctcagactcccaaaccatgagaaataaattgttgtttataaggtacccaggctgtggtattgtgttacagaagcccaaaaggactaagacaacaaaaatgaacaaaataggcacatccctaagtgcacggagtttacagcctactggcaaaggcagataaacaataaccacactaataattgtatttaacgggtctgagacagagagctgtgtgccaggaatcatcctggaaggataggtaggggtaaaatcagagtcctctccattccctctcttccaaactcacaatgcttttgtgtattttcacagcctcctgcacatccctctgtcctggcatgtttaatgccaggccatcaggtaagacattccaggtcttctttcctggagtataaggactatgcctcttgtatctctttaatccaagtgcccatgaaaggttctgtaagtcattgacttccttaaatattttaaaaaataaatggaggaacaaagagggagaagttaaaccaccaactggggaatgtccaggtgttcatgtctaagaaaagagtaatcactagcttttctcactgtctctacctggatatagggacccaatccaagtagatactaagaaagataattctactggctgatattagataggattggggggaagaaaagatgaggaaagaagagaacatggggaaaaaactgaacttgtgaaatgaaataatgagtggagttggagggagggtccttggtgagtatcagtgcagcccaaaaggatcaggtagtctgaagggataatgtcatcatggctggagactggacactcataggaaccccctcctctgactgtatttttctctgtgacttctcctgcggtggtagattgggattttattcccaattcttcactccgtataaaagaataatacggccaggtgtggtgactcatgcctgtaatcgcagcactttgggagactgaggtgggagaacagtttgagcccaggaatttgaggctgcaaagagctatgatgtaacactgcactccagcttgggcaacagagtaagaccctgtctcaaagaaaagaaatcatatgtccacttttttgtggtaagtacctgcctctagatttggaagagtttacttcccccacaccactgttgttgggctcaggcatgggacttgatttggccaataggatctaagcagacatgataggagcagaggctttcattcctgcacttctgccatccaccgtaagataaacatgctccgttggcactggtcccaacatgagaaacaactggaggaaacctgaacctttcccttagcctgaagcagagccaacacagtcaacccacagatctatgagcaagaaaaaaaatggttgttatcgtgagggttgcttgtcatgcagtattatcacagcaatattgcactactacacttgctttcttttttgagaatttcattccactctcccttttctgcttaactttcatgtatctcaaatgatgttataatttctttttatatttctgatgaggctcagggatctccttttcccctcatccacatacctaaaaaccaccttgtgcacataaccaatcccacccatttgtaatgggctctgtacaaaggccacattaattgcacccccctcatccaccactcccccattcccacacacatacccatgctctgccaggaaacctcctgtgtagagaagcatctggggtatgggaagagctttggtgtgtcagaaagatctcaacaaaagcatgaagtttaagagacattgtgtaacctgccctggatcatacattttaacagttagaatgtgtttggccccaagtaacaaaaaacctgatgaagaggggcttaaatcttgagaacagttattgtttacttaacaagaagtctggttgtagatggttcaagagttgattcagtagcttcagaatcaactgggttggcatcttggcaattctcttgaccttcctttcatggttgtgaaatggctgccacagctccaagcatcagcacccacgacccccaacctgcatccaaaagcaagaataagggggaaagccaaggtagcaagagagactttgtttgctttcatctcttcttttatcatagaagaaagtctttctcaggaaaccccaagtgagctttcccttatgtttcgtggacaattacgtctcctggatcacaaggctactcctagatgcaaaggaagctaggaaatgagttttgatcatgagttttgctcacgcctctgtagtggaggcagagataggagcagggttaggaatggctgttgggtatgtggtagagaaagagaagcatcatgcatttatcccttcaagaaggacttgcttctctgcagtgggaagtgtggtcagcagacaacttccagttgtcagttccttcagggtctgccccagcttcagagagctgtctcacccaaggtcatgcccttcccagagcagcccatacccagtttattagttcgttttcatgctgctgataaagacatacctgagactgggcaatttataaaagaaaggtttaatgggactcacagttccaagtggctagggaagcctcacaatcatggtggaagacaaggaggagcaagtcacatcttactagatggcagcaggcaaagagaggaacttgtgcagagtaactcctctttttaaaatcatcgatctcatgagacttattcactaccacgagaacggcacgggaaaggcttgcccccatgattcaattacctcccactgggtccctcccacaacgtgtgggtgggaatttaagatgagatttgggtgagaacacagccaaaccatatcacccagtaacagagcaagggaggggtataaaagcccaatgggagatgctctacaagcaatccttgctctggagctcccactgggttggactttgtcaggcctgcatcaagttagacttcttcctctgccctgttctgcattttcctccttcctttcacaggttttgatccctaataaacatcttgcagcttaggtgactctcagtgtctgctcctgcagaatccaatcagtgatggcatcttccacatacagcaaagaagtgatatagccaggattagaaactaggtctgtccaattccaaagccccaacccatccccactccccaaccatactgcctcttatggccaccatatccatttcctcaataagcactcactgaatgtctactctgccccgagacctaagtgggacaatggggatggtactacaggctgtactgtcttgtctgtttaccaaaacccacatccttctcttctccctgaggacacatgtagtccgtatttcccagcctcccttgaagctagttgaggccaaacaactgagctctggctagtggaatatgagcagaagtgatgtgtgctgttttcctggtgaaagtttttaggaagcaaattccatcctccatactctctttccttttcctttggcagatgcagagaccaaaaaagccctaggatatgtagaaccacagatggaaaaaacctgggtccctgaatcattatgatgagggacagctattctatgacaaacttatatggtgtatagcaattataaactgtggagtcaattacctcagccaagcttacactaactaatgcatggatatagagatgaatcacagatagcccctctcttaaggaactcagtctagtggagaagctgtggataggaagagatacagggttgtgtagttagcaactgggccttgagggagaggtctgatttttgtcctggctcctaggaagtaatttctaaacccttaggatatcctgattaacaggagtgtctttgttattcatggtgggctcctgggaccacaactcacagcttatgctaaccagatggcttatagtgagtgctggccatgccagaaaaatcaaccacagggttaaaagattggggctttgggctatgtgatgtcagcctgacctttgggtgtggggaggggtatggaggttaagttcaaccatgtgggaaatgattcaatcaatcacctctacataatgaagtcccaataaaaactctggacactgaagcactggttagcttccctggttggccatactttgtcatactgttacttatcaatgctggcaaggtaacagataccgaggacacgggtgtttagcatttggaaccctcccagattccttcctatgtccctttcccttggctggttctgattcgcattctttgcttgtaatcaatgtgacttgagtagaatagctttcagtgagttctgtgagtctttctagtgaattattgagtatgaggataatcataggaacccccttgtttgtagccagtcagtatgaactgatggtggccctggagatccccaaacttgtatctggggtctgaagggagagggggagattgttccctcagactttgctgactttacagcctcaagattgctgactttacagcctcaagatgtaaatagctttaaaaggtcactaagaagtgactgtataccattgcactccagcctgggtgacagaatgagactctgtctcaaaaaaaaaaaaaaagaaaagaggaagaagaagtgactgtaatgtaggcacctggtcaagacagcctggagtgaatggtgaatgttctgacacatgaggtgccctggcatctgttgccgtacatgagggtctcacctgcagttggtctgtggacaaaatatgactccccgctcagtccaggctctgtcactgacttgctgtgtgatccttacaaatcacgacactctctccagacctgtttccccatatgaaaaacagggggccagatgagctgatatcttagagtgcctccatctctgacaacctaaggagttatttcctcaagcttcttcagagaagaaggaaacttccttccctgaactccttcaggaattctgaatcatcacatccactaatatccaatagacaaatgtcccctgccacatccctgttgactagcatctcccctcagctggctcatctgcagtgatgggaagctcactctttcatggtgggagcagtgtggttctgtaaaagagcacagctctgggtttcagtcccagctctgtccttccctctctgtgataccttgaaccaatcactccatctccccaaggctcaattttcctcatctgcaaaatgggtggacgaatacctacaccatggagatactgcgaagaatggaaaatagcagtgcatttaccatctgctcacaccatgctgggaattgttctaagtgctgtgttcatattttctatctgaagaggcaggtaacatggtattcatcacccccagaaaagtaagaaagttctagatgttaagggacagagccaagatttgaaccagcaaccatgttctgaaccacacagctgttctgccaccacatacaggaggtgaagggcttagcacagggcctgacctacggccacctgactccattgagtgtaccagcaagacaggctgagagagtgagggagtgggaactggcctccataggcatagtcagagttttgcacaaaacaagaacctaagagctattttaatttcagcatacatgcaagttttatgttttacagtttaggtattatttgtattctgagtcacttatttgggggagagcatcttcatatcagtttttcaggcatggcacctccaaaggtcatcatctgggcctgcatctctcccagaacagccaggtcttctgtgggtccatcagattatgaaacttcccttcttgcccgaatcccaaatctgactcccacggttcctaggtcccctccctttcactgccctggaagagtcctgcagagacctcaaggcagtgggccagcattgcttttaagttcatgcatggtacaaaccaccttaaatgcattccgggcatggcaggagacccatcagacttcctagagctgcctgtggtcaagattagaagaggaggcatcggcctggctgtgtcctacccttgagccaacagggggtgctgtctccgactaaccctacctggctctgagtctccaaacctggggctcaggaagccgcctcctttgcacaccatccaaagtgagttcaatacagccacccctgcccccaactcatccaacacacacacatacacacacacacacagacacaccccatctgcagaccggccaactgggctggctgcccacctgctttccctctgtgggtttttatcaaaggctacagataacaattccctccccatttccactcccacctcccctcctgtgcttcctccaagcccatccttcctggaatcccagcatcattccagagttttgaaaacttttgtgtttttttttttttccagatggagtcttgctctgtcacccaggctggagtgcagtggcttgatcttggctcactgcaacctccgcctccagggttcaagtgcttctcctgcctcagtctcccaactagctgggtttacaggtacgcgccaccacacttggctaatttttgtattttcttttttagtagagatggggttttgccatgttggccaggctggtctcaaactcctgacctcaagtgatccacctgcctcagcctcctctaacgtgctggaattataggtgtgagccaccatgcccagcttaaaacctctttatcaccataatctatctcatttgagcctcacaactgcattgcctatgaggaagaccatggggcagggattagagtctcctcagcagaagaggaaactgaggcacagaaagagggagtgagggagcacatggcccatcagtgatagggctgggttgggtaggggagccaggctcctgaggacagggtgtgcctgaactcgagcctactgttggttgagggaccttcttctccaaccccctcgctgggaaccaccggctgtgagagtaacttcatgggcagtacttattcctaaaaagtcaagagaactgctttcctgccaccaacttgctgtgtgcgtgaccttgggcaagtccctctgctctaagcctctgtggaatgtggcgatcccctcaggctcccccactgattgagatattctgactaaacaactggtatctgaatcacctccatccctttggggtccctgggatcctctaccaaaacgcaagagggcttgtagcagagctaacagcaccatagcgtgataacaacactcgtctccatttctccactgctttctacagcctcaacatctaatgtaatcctcactaccaggaggtaggctctgtaattatccccattttatagatgagaaaactgaggctcagagaagcgaagaaagtggctgggctagcattggaggctggggggactccacctcaaagggcaggctcttgattctattgtcatctactcatagaagtttctggaagtttgctttagaaactccactgtagaagctctatggtctttcagcccccactcaaactgaagcccttcagctgcccctcaaggatcgtgagaacaaggacacagatgggaaggacccacgtcccccagcctcttcccacccaccctccttgagccagcccctcatcctggacccacaagcacattgcagcccagccagagcccgtgagcagatgcgggtttattattgcacagactgcagcatcctgaaccccaaacccaaccccaaacaccagcccccaaacttggcctgggagctttggcaggcacaggcttgtccccagcaccagccaaaaaaaaacaacagaaaaaaaacaggacaagaatctccgagacggagcccgtcagcacagagcagtggccccgccccattcccctcatgctccaggagtcttgagaagctcagatgcagatgcagagctgtgggccatggccagctgaggatggaagaatctgcaggttcttctccatgaaaatacagtcctggattccagccaagccacaaggtcccagcagggcttgaaacggcaagtgtgaagctaagggagaaggttcccaagcattgaagggaaatgggaaagctgaccctatcagaagcaaactcctaggtcccagagctgcctggggaggccctgccacaaagccaaagcctccaaggtccacagaaatgaagggaggacagcagcagttccctctggctcagcttggatgccacgtccttccccaggcttggaggggcctggaagccctttctctccattctcctggaggcaggaaaccatagcctttggccctcaccccacccacaggaagcacaagggcccagagacctagtgtggtacaaaacatctttaagtgaggtacatccaagtagccatcttctaccaagtaagccaaaggggcttataactgcacccaggctgtacccagttggagccccagacttgcccctctcttgccgggaaatgcttcttgacaagcagcttgtcttcaacacctgccttagtgtctgccccagggacatctccctgggcttccatgggcttctgtgctcccctgagctttcggtgggccctgatgggggaggagacaagccatttcacagggcatcacaggagatttctcgccggccccaggcctcctgcaggtgaccctctagcatcccaagcacacgggaaaccccaaatgcaatcccagtctcagacacactccaaaacaggccatcatcactgcaccttaacccctcttcccaccctgccccctggccacctggtcagtggcttcccagccagaggatccatggggtctcccctcgtctattggtccagaagggaagctaactggactggtgggaggagacagagcactgtgttctgggatattcaaactgaccttgtccatttcctctactgtcatccagaacatctacaggcaagggagggagtgcagggtgcagactgcacaaggacaggtctctgtgctggtctgagggggtctcaacacccaccccacccagcttccctgggaggcctcagcccacagccaaaggattaaatcaaagtggggcagggtgggaggaagggggatgggattgaatatcaatgtcctggttaggtgacatctcccaaaacacacaaaagcccagggaggggacaacctagggaaaggcaagggagtggaggagagcgggggacaggagcagatcaggaagctcaagagaccagggcgcttctctctgggctctccttgcccctgggtagagagctcctgaaggagcccaggacattccattcctcttggcaccaccaccgccacccagcacaggcaccgtgggaggcctcctgaaactcttgtggggtgaatgtgaactggaccacggggctccaggtccagagtccagtcctctttggccaccctgcctggcactgcaaaaagacgggtcctcatgtcctcagcaggaacttctggctctgcaaagagacagcaaaagggtcaggcaagggagggagggcagaggctgggccgccaagccaggtgcagggctcaagccttggggctcatcttctctggggcaagatcccacctctgcatccccccagacagccctgtcccttgattctgatactcggcaggtcacaaacgggtccccgaggcctctcctggccctggctgcctgcctgtttatttacacatgctgttccctttgctgctgcactcatctcttccctcttcctcccccactgtcatctggttcactccttttcacccttcaggtcattaaaggaatcagtgcctgcaggaagcattcccagagcccctgttgaaacatggaacctgcagagctcaagtgttcacccctacggcagcacttaccaggctggtattgtcattgactgtttacatggtgacagcatagactttcctggggctgattaagaacctccagcccaaactaagctaggatcaaaaaagggggcctgaggaaaaggcagaaaccctgttattattgccaagcatgggattgaggctgtgaaggctagttccagcagggggaagattttgtcttgtagatgcttcaccttgagagcagtgagggccactctccttcagcccagcccagcccactccacttcacgggaacttaccccagcccccagctccatcatggggaaaaaactgagagggaaccaatgggcagaggaacaggagcaggctgggtgtgccaagggattaaagactgaagtggggaagagagaaagggagcacggagatgagtgtcccaccgtcccaggtgagctcagtctagacctgttgtgctcagtgtttgaacggtaagacttttctgtaatgagctctaagttcagggttactttcattatgttcaccccattcttggagcaggagtgagtccctgctgtatccccatctcccagcagagcagtacatgttggccaaatgaatgagtgaatgaagccctcagtgctcacctgacagagagcaggtgctctgcaaacactaagctaatgaagtaagtgtgtgtgtgtgtgtgtgtgtgtgtgtgtgtgtgtgtgtgtgtgcgctggtatcaaatcacactctaggtcttggcttctgcaggtgggtgggcctcaattagtcacaggactgtcatccaagtaccgagtaggtccctcctcccaccaccctggtgctcaaaactccccaggggctcctgccccccaacccctcctccagccagctggctgcacctggtaagcgacggtcaggtcaggaggtgaacaaagaggatggccaggccgatgttcagcaggatcaccatgcagatgaggatggtgttggggacctgggagcagtggagagaggcttcctgagtccccatggcctcggagacaccccccacccaggtcacagcaaggctggacagagcaggaacttctggatggaccttcctaagagcattgccggctttgttcactgctgtatcctgtcacctggatggcagaccatcacagctggaaggactcttagaaataaccaaatccctcaggacccagggagggacaagatcatgccccaagtcatatagtgtgtgaatcaggcctggaacccaggcatcctgctaattccccttgggacgcattcttcagtcccccaaagcccagcttcagtctttgttgccgccgttcctagctccctgcctcccataagtcaggaggtctataacccaaatcctgttgggcccttcttccacctccatgaagccctcactgctacaccttgtagcagatgctgctggtgcccagcccaacccccctgactgggcaaatggacccaccctccagctgctcaggctcccagctgcccctgctcatgagaactgtctctgccaatgggataccaggtgcaaaggtaggaggactccatgcggccatttacgctccaacgtcctctgtggaccaagccaaggctatgctcccctaatccccagccctgcagcatttcctcctgctctatcctgcttcggtctctcgcaccccagcaacccccaaatcccctgcccctgaatcctccctcaagccctgctacctctagggaacccgaccttaggcacaccttgcccgacagcctcacctcttccacctccacctccgcctctgccgccagtgcggcctccttccgcgccttcttcttggcccccgccttggtcagccctcgagcctcagtcttgcgggccttggccctgggctcggctttggggatgatgggcttgggctccagcttggcgggggtctcgcgtgcaggctcggggcctcggagcgtgggggcctgcagcggggcggtggccggggacgagggcgcggactcggacccggagacctcgggctcgggctggtcctcaaagggtgggggctcgggcggcgtggtgcgcacagcatagctgtggtagccctggtaaagcgccacctccggctcccgcgacggcgcaggcggtgcctgcagagcctcgatggccatgcgctcggtggctggacgcgcggggctgcggcggcccgcgccctcggacggagtgactgaccggctgccctcaccgctgggctcgccgttccaggcgcctgggctcagcaggccgtccttggacaccccgggcctgggccgcttgggctgcgggggcgtcccggccggtgacggggagccaccctcgggccgaggggtctcacgctcgtgcagctgcgggctctcgcggggcggctgtgggaggcccgctgcgccggcgccccggtcggggggctccagcaggctctccgagttctccaggatctcctgcagcagccggcgcttctgatattccggacctgccagggcaacacagggaggctgggctcgaaccccgcaccactgttgggtgatcctgggccagccacttcacctctcgagcctcattcatgggctcagtcggcactcacatagcactgaccaagtgccaggcactgttccaagcactttccaaatattaactcatctaatccctgtagtatccctatgaagttgatgctactgtgaacctcaaagggaggctctgagaggttaaatcacttgcccaaagacacacagctgtcgaagggcagagccaggactagcacccagcagtctggctccagaggcgatgccctttactttggcacgcgtctctttccattcccttatctgaaacatgggcctgatcatacctattttataaatacgaatggaaggattgagaaaatgcatgtcaaaggcggagctcagggccccgcaccggcatagaccagcagggggagcgctgtgaccagaagtgagggatcctcccaggcataggttttcgctcctaggtttttcatcaggcctcctttggcctcctttctgcagccaggatcacgtttagaaaacacacatctgatcatgtcattaacttaaaaacccttcatggctgggcgcggtggctcacgcctgtaatcccagcactttgggaggccgaggcgcgcggatcacaaggtcaggagatcgagacgatcctggccaacatagtgaaatgctgtctctactaaaaatacaaaaattagctgggcatggtggcgcgtgcctgtaatcccagctactcaggaggccgaggcaggagaattgcttgaaccagggagtcggaagttgcagtgagctgagatcgcgccactgcactccagcctggtgacagagcgagactccgtctcaaaaaaaacaaaaaaacaaaaccttcatcgcagagaatccccatctctgtccctcaggggttcccaccactctatccatgtgccagatctctaccaaggccgggaggtcctccttactctgcagcctcgattctcaggacccacagcctactttgtgatgtggcttcctggcatgctgctctgtccgagtttctgtgcctttgcacctcctccactcatcccacccagcgctatctggtacagcagctctcaaagtgtggtctcagactagcagtatccacatcgcctgatccttagaaatgcacattcattcatgggctccacctgagacctactgaatcagaaactctgggggtggacccagcaatctgtgtcaaatttgagacccactgacttgatagactcttgttcagcctgcaagattcagctcaaatggcctctcctgagggcagccttctctaacacttcctcttgcctaactgcttcctgtgagctccctcctctcccattctaaccgcacagtgctcatcctgctgtgtgaaatggaaccataatcatgaaacaacagccacagtcactgagagcttactgaggactgggaatgtaccttacatgcatttaatccatgcacaaaaaagcaggcaccattcttactaccattttacagatcaggaaactgaggtttacagaggttaaacacctcactcaaagtctcacagctgggaagcagcggaatcagggtttgaatgaatgcagagtctgtttatggtacccctagctctgttgtttttgtgactctctgctcccctagattttggaacccacttatgtaaccccagagcctggtacagtgcctgacacatggacagtgctcaatgcttgactgaaactgttgggcaagtgcaagaagccatttttccctctcatccaccagtgacttctctcctctaagcttcaccagctccaactgtcttccctgctcagagcagagagaaaagaccacttggagtgactctgctgccctcccctcgagctcagcatgaaggcagagatgtgtctccccacctacccctgcatcatcccatcccacatttgcaccatgccccagtttctgagactcacgggcatccaggaaaccacttgggcatctcagattccagtaagcaaagaaaagcgcccaccctagggatagccctaccctgcccatccttccctggctggccctacctggctggtagaagtccggagccagctccctggccaaagtgcgagcaatgttggactcctggttggcagccagggcggcctgttccgctgcctcagctttggccttggcgtggcttgtcctatggagacaatgtggcagaagactcaggatccttccagagaaccagccttctgccccttctccccaacccacaaagagacatgctaaacacagcattctttcacgcaggcagtcaatgaatatttattgagcctcatggcccagactgctatgcattctccagatcatttcttcttctttctgagcacttagatagactacctttcccaacctcccttgcagttaggtgtggtcaggtgactgagttctggccagtgcattatgggaagacatcatgtatgctatttccaggcttggcccataaaaacttctgtgccctctcttttttccccagcattgctggttgaatgcagagcaggctgagtccccagaatagggacttaacttctgtgtcacagatccctttggcagtgtggtgaagcctatggatcccttctcagaataatgtttttgaatgcataataatatacataggattacaaaaggatgcagttacttgacatactgtttccaaaatatttaaaagaacacatttgtaaaataataatctatatctttataatcacattaaacaaaatatcaggtctgttaactactgtaattttaaagtatagataagcataaaggatatttcaaggatatctaattacaacatataatatgacatgaaaatatatgagatttctattggtgacaaagtcacagctgctactactactattatggtttattgcctatttccataattgaagagaaggctacatttcagttggagttaataaaaatacagatgtagcttttctcattgtagtgggtacttctggtgccctatgcagatcccttcactgggcaaatgtgcctacccccggctgatgtgagtgttggctgctaatggctccttactaccccagagaattgtagcccatagaagccaccttgttccagaagttaaaatactgccctgccagccaggcacggtggctcacgcctgtaatcccaacactttgggaggccaaggcaggcggatcacgaggtcaggagatggagaccatcctggctaacatggtgaaaccccatctctactaaaaaatacaaaaaattagccgggcatggtggcgggcgcctgtagtcccaggtactcgggaggctaaggcaggagaatggcatgaacccaggaggcggagcttgcagtgagccgagattgcgccagtgcattccagcctgggcaacagggtgagactccatctcaaaaaaaaaaaaaaaaaaaaaatcctgccctgcctacccctaaacctaggcagcccataccaatgactggtactggtcagcctcctcttgcctcaagaggaaggaactccagctgcagcaggtacaatccatgctccagagcccccggtggactggctgaagcaggtctccagctgagaccacatctcagctcatctccttccctacgccatcctgcctctcattcttctctctcctgaaagcctccctcagtaaatcacttacacaagaatccccacttcaggctctacttctagggaatctaacctacaccgtccaagttcatggacccctgaaatctatccacagaccctcctgtggactccaagttaagaaatgtgagcccataaatgattgcatggagcaaagccccttcccacagccccacagttgcacgtgacaggagcaaattttaaatattcattgtcttaagtacctgagatttgggagatgtctgtttcagctgtcagcttagcttaactcacagaagtacctactaaagtaataacagtccaatttcctaatgggccaggcatggttctaaaggagttatgaagattatctcatatgctcattctaatgccttaggaagctggtgctgttattattatccctattttacagaaaagaaaattgaagtgcaaacaggttaagcaatttgcccaaggtcacagagtcctgaagtgcaggaactgggattttgaacccaggcaacgtaactctagggcagtggtgtccaatcttttggcttccatgggccagaagaagaagaattgtcatggaccacacagaaaatacactaacactaacgatagctgataagcttaaaaaaaacaaatcacaaaaaaaatcccataacattttaatagagtttacgaattcgtgttgggccacattcaaagctgtcctgggctgcatggggcccatgggcaagggttagacaagcttgctctataccagtagctgagcatgtgccagagcctgtgccaggagctgagcatggccaggaactgaggacagagactctgtggaccagaaaggctactgtcagatgagggagctggctagtaaacagacacaaaaactatttaataaaatgcaattaaataaaaagtacctaattataattgtgaaatatgccgtgaaggaggagtagagaatacaatgaaaatgcaggacagaaagacttaatgttgatgggtggtggaggtgggctggtcaggaaaggattccttgaggaagttgacatttgagttgagacttgaagaaacacatacgttaggcccctaagaggtgggcgggtcaatgagccaggtagacagaagggcatgtgcaaagactctgagactgaggaagagctttgtgccttcgaggagctgcaaagccaagtcagagtgtccactctctacagatgagttaattccctggggagctgatgtgtgtgtgtctttatctcagtctacagcagagaactgggcgcacggtaagggggataaattcccttaagcttctactaggcaccagggcttttatcccttacaaacctcaaaactgtgaggtagtgaggtagtgtttaccggtccctacttcacaggtggggaaactgaggttcagaaaggtgtcttgctcaaggaaacaaaataggagttaacatttacaaagcacttagtatatgccaagggctttacagaaattaacttaaccccccaataactctacagggtagatgttattcctatcatccctctctacagaggagacatccaaggcaaaggagtattctaaagaacccaagccagcatggtggctcgtgcttgtaatcccagcactttgggaggctgaggcaggaagatcacttgagctcaggagttcaagaccagcctaagcaacataccaagaccttgtctctactaacaattaaaaaaaaaaaattagccaggtgtggtggcgcacacctgtagtcccagctactcaggaggctgaggtcagcggggggattgcttgagcccaggagatcgaggctgcagtgagctattatcacaccattgcactccagcctgggcaactgagcaagactgcatctcagaaagaaaaaaagaattcacccaagcttacatagctagtaagtaccagagtaaggattcaaaccaaagcattctgggatctagagtctgtatcctaaccacaggctcaatttccattcaataacaagcagcagagtaagattctaaacctggagctgtctgatgtccaagcccctgcctctccactatgccatattgccatagtaatgcttactgaatgaatacatggctgaaggcacgcatgcaggcgtgcacatatgtaggggcaaggagacagcctagggaagagttaagagcacacagttttagaattaacaggcctggattccaatttgggctctgccaaggccagggacagaatgagatgaccgaggcactcgcctcaggggcaaaatttatggggttgccaaaaaactcagtgatcaagaggaatcacattttaatgcaatattttaaaagtctaaattaatgcaaaaataaatccttgatgaacaacctatgaagaaaattttaaataaagcctggattggaccctgcacttggatccctcacttactcactcacctcaccccactgggagtctaggaccttgggtgcatgcatggctttacctctctgtgcctcagtttcttcatctgtaaagtggagatagtaattctcccctcctgaagttgccgtgaaaactaagtgagaggcaacgcgtgaaagtgtttggtcttgatgatgacgatgatggggtgttggtggcggtggtgaaagaggaggaggagaatgacatctgtacatcaaaactgagtgtgctacatgcatatccccaggcttatttttgcctgcacgtgagtatgtgtgagacaaagttctaaactttttagagccacttctctgggcacatgaaaccccaggagggaggaggagggaaagggctgggcaagccttcaaactgagaaaatgccctttttttggtcatgtgagcagaaagatgcccactttctggtgcctttggaagctgggttgaggactcctcaggcaggaaaggcagcctctccccacagccctggaagattctgggggacccactgtgcacagccagaacaggggcggccacacagcccagggcaatgagggctgctgtgctggaagcaagcatactccctgtccatctccaaccacccggcccgctgcatcctatcagcccttctcccctgtcccatgctcccaatctctgatcccagccttcaggccaggaatcccggtgttcttcagcaccctccctccccacctccttccacatccacagcccatcaatcaccaacactggtctctccggctccctttataactcttagaaccctctgccactcctcctgcaccccttcccatgggtctcccctgcctgcaggctcactcctacagctgctcctacacacagcggctcagcgagcttgcttaaccacacacccgtggcctcaccccttgcttcaaatctttgcaaggcttcctactgtgctcaaaataaaaccctagctacttagtatggccttcgaggctctccagacccttgcccaaggcagtctggatggggtataccagcagctcacggggtgaagggcaggcggaatgactgtggctgggaggctattgcttctaggccagtgcctctcctaatgcagtccgtgacccccacccagtatcttcatcacccggaagctcagatatacaaattctcgggctctgcccagaccgactcatcggaatttgaagggaacgagcctaggaatctgtgttttatattccagattctgacttaagtttgagaagcacgtgttcggcggagagaaaagccagctccatcttgaagttgttcccagactgctcaaccccctaggagccttggatgttttccttttagcaccagggtccctccctgaatcaaggccctgctggggaaatgcaggaagcattcctgctctgctgaccactcaccatctctggatccatgcctctgggtgagggtctggaggatggctctgaccctgcttgggggaagggagcagtcactggggccgggggaggaacagggagactcttcttgatttcgttcggattaactttcgtcagcagggttaaaaataaggctggtgtttctgggataggagcagggctctcacccaatagagcaacttctaaaagcacctgcccccaccctggcctcctttccccatctctcctcccaggcccataactgcttggttgtttcccagttgtctccactaggcattggtggctttatggggccaaagggggaccctcaccggacttgccctgactctaggcctttgcttaggctgttccccgacctggaaggctctctcccctcctgccgcgatcctggccttaaagagtcagtttaagacccacctgtatgtattggttcattcatttaatacaactttatggagtgcctactatgtgctaggcacttttctgggcactgaagacatagaggcaaactgaacatccaaaaatcccttgtatggtcaggcacagtggctcacacctgtaatcccagcactttggaaggctgaggcaggaggatcacttgaggccaggagtttgagaccagcctgggcaacacagcaagatcccaactctatcttaaaaaaaaaagtaaaaaagaaagaaaggaaacaaaaatcccttgcagaggttacattccagggcacgggtcagcagatgacagtggtaggctaaacccagcctgctgccagcttttgtaccacccatgaatggtttttatatatttgaatggttagaaaaaaaaaaaagtaaggccaggcatggtggctcacgcatgtaatcccagcactatgggatgctgaggcgggtggatcacttgagactaggagatcaagaccagcctggccaacatgccgaaaccctgtctctaccaaaaaatacaaaaatcagctgggcacggtggtgcgcacctgtagtcccagctacttagaaggctgaggcagagaatcacttgaatctgggaggcagaggttgcagtgagccaagattgcaccactgtactccaactccagcctgggtgacagagtgagactctggctcaaaaaaaaaaaaaaaaaagtaacattttgtgacacatgaaaattatatgaaatccagatatctgtgtccctgtaaacaaaattttgttgaaacacaactatgctcattcatattgtctagagtagttgtcatagagaccatatgacctacaaacaccacaatatttaccatctagtcctttacaaaagtctgccgacccctgtactaatgtattcactcaatgaatgtctcctctactattattatgaataatattaatcttggttatttgttgagcactgtgtgaccagccttacgccatggcctcctgtgtaaacacatatggcctcagagagctggaggcacgttctcaaggtcacacactagaaagtgaacctgcccaagctcttacccatgacaccaagctgctgccttcctggtaccacttctgagccaggtccgtcatgtgctggggccaaggatggaaatgaataggacccagcagccgcctggggagctcgcagcccaatgcagccctgccaggtcaatcaggcaacatttctggaagtccatggatgagcaggggctcagagcaaagtctataaaccacatggtggagtggcaaagaggcggtaactctggccagattgcccgggtgcagaccctggctctgctcctcatcaccttaagcccagtctcctcatctgtaaaatgggaataataagggcacgcgtctccaaggaatgatgtgaggagtaaattagttacagtcacgtggctcagaacacaggaagtgctacctaagggcttgttacataaaatgagaagtgcagttttagcctgggcaacacagtgagaccccgtctctacaaaaaataaaaataaaaacattagccaggcatggtggctaatggaccccgctacttggaaggctgaggtgggaggattgcttgagcccaggaggtcaaggctgcagtgagctatgattatgccactgcacttcagcctgagtgacaaagcaagaccctatatcagaagaaaaagagagagggagggagggagggagggagggagggaggaaggaaggaaggaaggaagggaggaaggaaggaagaagggggggagggggcacagtgttttgaaggggactgaaacagaaatcctgaatgtcctaaatgccactgaattgttcactttagtataataataattttaaaaatccttcagcccaggaatcccatggtaggtttggatgatgggggcagataatcagggtccctggctcaggccactgccagcctctctggaggatgctcaggtgattacagggaaaatgctgcccagcgtcttcctgaggtggggatgcttccgatgtcactgccctaccctctcccaaaatagcccctcatccccagctctggctggtcatgaccatctaccccagaacaaccatggtcaggctaatctagaggaaggaccacagctgggtgtccagtcactggcccagagaactccctaggagaaagccccctccgcccccaaggatgcaggtgcagtcagggagccctgacccatgggaccttcctctccccacccaggactccattcattctcattcggcaaatgtgtgctgagcccctgctatgtggagcccagaactgggtgctagagacatggacagtggtcaatgaggcaggcagtgccctcctgggaagcccctcacaagacaggttaagggcacaaactcaagcccaatttgtagcaccatcatctagatatctgacctttgctctctggcctcagtttcttcaactctgaaatgggggataatctcacaaaattactgggagtctgaaatgagatagcacaaatgtgcttagcatgaactgagcacgtaacaaatattagctatcattattgtttctgttactattataacaatgctgaccagcattcacttccaaaattctatcatttgccaacatatggatgtgtcatctaaacatcatttcagggttcacccacattgtagcatgcatcagtacttcattcctttttattgctaactaatattccattgtgtggataaaccatattttgtttacctgttcaatagttgatggacattagggtgctttccactttttggttactatgaataatgctgctatggacatctgtgtacaggtttttgggtggacatgtttttattcctcttgagtatatacctaggagcagaattgctgggtcctgtggtaactctatgtttaactttttgaggatctgccaaactggtcttgagatggctgtaccatattatcatattatgttccattggtaatacacgagagttccagtttctccacatcctccctaatacttgatatcatccttctttttttttttttttggaaacggagtctcgctctgtcgcccaggctggagtgcagtggcgcaatctcagctcactgcaacctctgcctcccgggtacaagtgattctcctgcctcagcctcccgagtacctgggattacaggcacccgacaccatgcctggctgatttttttttgtattttttagtagagacggggtttcatcatgttagccaggatggtctcatctcctgacctcgtgatccacccgcctcagcctcccaaagtgctgggattacaggcgtgagccaccgcgcccggcccatccttcgttttgattgttgccatactagaggtttgggaagtgccatgtcattgtggttttgatttgcatttccctgatggctaatggatgttgagcatctatgtgcttcacggctgcttgtatatcttcttaggataaatgtctatccagatccgttgccagattttaattggatttttttccttcttattattgagttgtaaaatttctttatatattcttatgcaagtcacttatcatatatatgatttacaaatagttttcccattctctgggctgtcttttcactttcttcctttgaagtacaaaagttattttattttaatggagtccaatttagctatcttttgtcacttgtgcttttgtcatagctaagaaggttttgcctaatccaaggtcaaaaaaatttactcatattttcatctaagaattttatggttttagttcttctacttacttctacaaacactgtttctaataagaaaaaatgggaaataacctaagggctcatcccaccctctgaggtaggtactaccaccactttacagatgaggaaactgaggcacagggaggttagatcatttgctcattctcgttataatcaaagtaataatgaaggcagacatggcccctgctcttgaaggttgtagagtctgctaagagagacaagaccaagtaaaaagtcttgagtgcagaacaagcctatggggcaggagaaagcccatggggtgggtgacatgttcataatttgtattttattatttttatattataaatattaatataagacatattgtatgcactataaaaataaaatggcttcctcaaagaaaattttggaaaatgagcatttttaaaaataaaaaattgctattaatattttcgtctttttctttttaacattttttttttaaagatacagagtctcgctctgttgcccaggcttgggtgcagtggtgcaatcatagctcactgcaaccttgaactcctgggctcaagttatcctcccacttcagcctcccaaataactcagattacaggggcatgtcacagtacccggttaacatggtagtgtattccaagttggttaggaacacagctgcatgactgttggtgacttactgaaattctctgtgctttgatttttccatctgtaaaacgaggttatgaagagcccctatctcataagcttgtggggattagagagagaactgaccagcagaaagcactgggaacagggcctggcacacagcaagctcgatgcagatttgttctagttgaggtgaggagtaagggtggtgttggggattctgaggttgggggctgtgatagccctcaggccctatgtagaacctctccatcttggaagctccactgaaatcccccagcctccagctggagtgaagcctcctctagtgagggagtgggtgtgtgagctctcagcctagaagaccgggcaaagtaataagtgttgctgcttagcggccgggcgcggcggctcacacctataatcccagcactttgggaggcagaggcaggtggatcacttgaggtcaggagttcaagaccagcctggccaacatggtgaaacttcgtctctactaaaaatacaaaaatttgctgggcgcagtggtgcgcatctgtaatcctagctactagagaggctgagacaggagaattgcttgaatccaggaggcaaaggttgcagtgagccgagattgcgccactgcactctggcctgggcaacagagccaggctgtctcaaaaaaaaaaaaaaaaacaaaaaaaacaaaaccattgctgcttcctgagagctaactatgcgccagacactcagccaaaggcatcaatgaataatggccccaaagatatttggtcctagtgtctggaacccgtggatgttaccttctatggcaaagagggctttgcaggtgtgattaaataaaggatcttgagatagatcatcctggattagacaggaaggccctaaatgtaaccacaggtgtccttataagagggagatttgataacagaagaggagaagccaatgtgatgatgggagcagagatgggagtgatgtgttttgaagacagaggaaggtgccataagctcaggaatgcagagggccagcaggggttgaaaagacaagcacaaagatcctcccctttgagcctccagaaggaaatctgactttagacttccgacctccagaactgtaaaagaatatatctgtattgttttaagccaccgagtttgtagtaatttgttactgcagcaacaaaacaaaacaaaacaaaacaacctgtgtgatctcatgtcatcctcaagatgatgcactttacagcggaagaaacgcaggctcagaaaatcatttgcccatggctcatagctagtaagtccagagttggcttgagcccaaacccaggactccctggcacaaaagcctttgctgacccctgcatctgctgcaccgcttcagctcctgcccactttctacagggcccagcagctgtggttgcctcagcccagtcttgtcccccagggatatcaagaggcccccgagttttatattcctgatattcctgctgcctgtctgagagggcctggggctgggttaccagcatgttccccacatccttcacatctgcaagaaagtctggttctctggggcctggcatcacctggctgactgtgcaggacggagatctggctgcactttggcaaccaatgaaatgacagggagggaacctcgggccttgctcctcctccaccaaccaacagagtagtggaccctgcagttcaacctggatctagctgctggcaaagaggctttcactgcatgagctgacagagcactccaaaaccacacggggaaacttccttttcaaaaaatctatgcctgattttaaaattttacaaactataaaaaccattacattaaagcaacagtgcgctgacgtcactttgctaatgcaatagctattttagcttttgagccttccttgtctgtccaggtgcacacctattattttttcgttttttggggggcctccatttataacacagtgtacacacctattttttatcagggctgtgaacacaataaagattccatttttgaggcatggtggttaatagcatggaatctgaagtcatgctatgtgggtgtgaatccctgacttactagctttcacctagacaagtcaattagtccctctgtgcattggttttctcttcttcaaagtaagagatgtcaggcagatttctcatatggctcctgtattcccatcctagcgtaatcccttccccctgagtgtgggctggacctagagacatgcatctaaagaacagaatatgcaaaagtcatgggatgtcacttccatgattcgtttagactgtgacttctctcttgccaccagagtctcttgctggctttgctgaagcaagctgccatgttggagaggaattgagcccctcagtctaataggctgcaagaaactggatcctaccaataccacgtgtttgagaaatggatatttccctggtggagctttcagatgagaccacagccctggccaatacctggactgcagcccaagagagaccctgagccagaggactcagctataccctgatacccgacctgcagaactgttaagacaacaaacgtgtgttgttttaagctgctctatgtggggacaatttgttatgcggtgatgggtaactaacacaatggggataataatagtgcctacatcatagggtaatgaaaattaaatgagttaatggccacaaaggtctaagaacagtgccttgcacagagtaagcactatcgaagggttagctgttcctgccatacttttataatttattcacttaagtaattttccagtttccatatactgacatttatcatttaattgttcaaccatttttttctttaaaaatccatcatctacatatttttgtgctagtgattccccttctgggagtgtgatcaacagatatactcaaattgtacaaaatgacacatgtacaagtcccaaatgacttctggaaacttttgtccccagacccatcattcacttctttatctggtgaactcctactcatccttcaggaccctaccccaggaaagcttaccctaactgccagctgtctgctcttaccatctcttgcacttagctgccaggtgactttgcctttctctgattagcctgtgagctacacggtatttactgtaacactgtaatagcaaaagattggaaacaaagccaagtccagcagtacagagctggttaactaaattatggcatagccatttgaaggagtattatgtagccaatcctaggaataagattgatctttgtgtatgacaaagagtgaattccaagatatgttaaatcaggtagcaaggtgtaaaagaatttctattgtatgtaacatttgtgtaaacagacaacctgtttgctcttctatatagagaatatttatggaaagataggtaagaaacttataatacaggttgcccactgtgaatgaggtggaagggaggcagacagacagacacacacacacacacacacacacacacacacacacacacacacacatttgggctggttattttcctttggccccatctcccccccttgccccaccccatccattccctacccagctctgcccagggagatcatctctacagcctgcatcactagctcccttgctcactggcttccagtgcgcccagtcaattcagggcccaagcacgaggccggagagggctgggtatctattccacttctccctcttcctgcctgtctgtctcctccacagctgcagctctcacccacccccaccgtccccctccacacctgcagctctcacccacccccaccgtccccctccacacctgcagctctcacccacccccaccgtccccctccacacctgcagctctcacccacccccaccgtccccctccacacctgcagctctcacccacccccaccgcccccctctacatctgcagctctcccacccccaccgccccccacacctgcagctctcatccacccccaccacccccctccacacctgcagctctcacccactcccaccgcccccttccacgcctgcaggtctcacccacccccaccgggcccctccacagctatagctctcacccacccccaccatccccctccacagctgcagctctcacccactcccaccacccccctccacagctgcaactctcacccacccccaccgtccccatccctgctccagtcatcacaccatttccctgtcccccacctcttgccccttcaggcctggggtataacagctcccatggctgctggtcctggatgccttaacataccttgttaatttttctgcccacatctctgcaaacagcaccttctttaaactctccccaattaaacccttgcaatagaccctttcctgccaggacccacactaatacgatccttctggatattctgaatgtgcataaattataatcactccaaaataaatatttttaaaatctcacatctattggtactagaccttttagaagtatggtttcatttattccttacaacaatcctagcaggcaggtattattatgtccactgaatagggaaactaggcctcctttgggggcagccacacagcagggaagctctgggttgtgatggaacggcagtctacctgattccaaaggttgtgctaagccgcatcaccagcacctttgctcactggcttccagtgtgcccagccgactgactggaggccccagcaagaggccagagagggctgggtgtctattccccttctatgtcagggcaggatggccctaggggagattcaagtctaatctcctgcctatcaagcaagaagagggaaaggcctgggttaaaaacctaagtttcccaggctggtcctgttccatctgatgctctccaatgccttcttagagctggaaggcatgactgagatgtaggcagggggcgatataaataaatatatacttattataaatatatataaataaatatacattataatatataaatatatatttattataaatatatataaataaatatacattataatatataaatatatatttattataaatatatataaataaatatatattataatatataaatatatattattataaatatatataaatatatatattataaatatatataaatatatatttatatataaatatatatttattataaatatataaatatatatttattataaatatatatttattataaatatataaataaatatttattataaatatataaataaatatttattataaatatataaatatttattataaatatataaatatttattataaatatataaatatatatttattataaatatatataaatatttattataaatacatataaataaatatttattatatatacatataaatatttattataaatataataaatatttattataaatatataataaatatataataaatatttattataaatatatatatttattataaatatatataaataaatatatatttattataaatatatataaataaatatatatttattataaatatatataaatatatatttattataaatatatataaatatatatttataatatatatttattatatataaataatatatatttataataaatatatataaataaatatatatttataatatatataaataaatatatatttattataaatatatataaatatatatttattataaatataataaatatatatttattataaatatataaatatttattataaatatatataaatatatatttataaatattataaatatatatacattaatatatattataaatatatatttattataaatatataaagatatatttattataaatatataaaaatatttataaatatacataaatatacatttattataaatatatataaatatttataaatatacataaatatatgtttattataaatatatatataaatatatatatttatatatatattaatatatatttatatatatatataaaatatatatatttatatatatatataaaaccacctgtgccaggtggctaaccatttagctgctgggtgctgggaatgaccaagtggacagaataccaagaggggtaggggggatgcctggggggctcagggaggctgctagtgacaaaccagtatagactatttcaatatttaacaattggcatgaccatacctactggggtgcccagctagatgctaaccccggatgtaaacgttccttcttatgccccatctagtccagaaaccttccccagaggccacccccagaaaatttggtcttaaacctctgcttaaaaccccacagtgcctttcctagtgcctgaaggatgacatggaaatgctttcatgtaacttcatgacttagctcctgccaacctctctggtctgactccaaactcaaccttctagtcagacagaaacttccagttcctcaaatgtgccctgtcgattgtttctatgcctggggtgaaaacataggtaatttcttctcctgggaactcttgtctccatccccatctttcggttctttatctggtgaactcctactcatccttcaggacccttccccagggtagctcaccctgactgccagctctctaccgtctcctgcatttcgcttccaaggtcactttgtcttcctctgattagtctgtgagtcccacaaggggcagaagcttcgctgctgcgtgcctgtcaccagacagaggctggcacagagcaggactatttatctgaaaatatttaggctcaccaggaatgtgctggacaaacgttttgttatatgaatcacatatacttgactgtgagactcacagagctggacggacccttagaaatcatctcatctcctttaagatcaacacagcaacaagaaggggaaactgtggcccagagaagtctgtgtgatcattttcaattttcaatcattgagagttagtcattgtgatcgttactctgttatagacatattggaagggttaggtactacatgacaggcccattgtaagtgcttgtacatatcatgtcactttactgaacagcagccttatgagagaaatactatcattatcaccctcagtgtacacatgagaaaaccagtactctgagcatttcaataacttgcccaagacaacctgtacacagacagcaagggatggcaagttagtccaggtccacaggaggtgcttcatggaagccttgggcaatggagctgacacaaaaatgtgatcatgtaccatggatgaacagagggtaaaacctaccccagaccccttccagcctcatgcttggggaacctggaggcctcagatggcctaggagtagtgaacatttctctttaggaaacacagacaggatgaaggtcctgccaccctctccagagggccatgactgtcaccgtgctcctgcagggggacgaagtctgctggaaaatggcctcaccctttgcctattctgctccctgggtgcaacccagcaagaggatgctgaatcccctgggactcatcgccatcatcatcatcaacatcaacatcaccattatgaataggcaatgcttgctgcgcacctactagatgcccggcacttgcatgcgttttcttaattaattctcacaatattctctaaagtaggtatcactatccccactttgcaggtgagaagattatataacccgtcaaatccacacagccagggaagaggaaagccaggaatcctattgtggcttaacaccaaaataagaagatggaagcattagttactactggagtcagacaacctggtttcaaaccccagctccctcacttccaacttgcatgatctttgccaagtcatggaacctctcccagtctcagtttccccatctgtaaaatgggttactaatagcacttagctatactagtagctacttcttgtaaggattatgtaaattgtggcatgtgaagggtatattcattcagttgtgacaaggatttactaggcacctaatagaccctttcctgccagaacccagactgatgcaacccttctggatattctgaatgtgcatatagtatatagtatatgtgtacattatgtgtaccagaacctgggctaatcttggggtaccattgtgaacaggagagactcgccttctggaacttacagaccagctcagcattgtgcccagcacatagtaggtaccccatgaatgttagctgctattttttgttatcactacttagcggattttctccccaagggttgggctcccaccctggggctcgcctgcccaggagcctgctgacttagctcttggtgtgctctgcccccgccccgccccaccccacccgggagccggcctgcaaaggcatcttacaaggccccagtcagcagacatctcctgcctaaataaggacaaggcgcccaggagagctttctgtgagccggaggaatgtgacagctgagtcctcccagcccagcggcctcccccgcctcccgcccctccccaggtggggctcggctggggcattccagcttttcccagagcagatcccagtgtcactgacacccactcgcaccccaccccaggctgctctaaaaactgataaggagctctgggaaggaattccaggcagctccatttgctcctgggggctggcgaccctgctgtcacaaggacaggggaggaagaagccaccaggcggggccgaacccagccttcctctggacaactgcatccctttgttcaaaacacacttccagagatcggattcggccccaggcaccgtgccaggtactggaggtccagaggaggttccaaccccgttgccttatcccatcatagcagtcacaactgggctaagtctttgaatcctgccctttcaaagactggattttgaacaagtccttctaaatactggctttccttctctctgacactgggaagagggagaggagaaatctgtctttcaggccagtgtctctgaaggatgggatgctttctactggcaggaccaagaatgataggtggtaccagaccattcattaagtaacactgtagaaagtgcatctgtaaaaagagaaaaaatttaaaaagaccttttttttttttttttgagacggagtcttgccctatcacccaggctggagtgcagtggtgcgatctcggctcattacaacctctgcctcccgggctcaagcaattcttctgcctcagcctcctgagtagcggggattacaggtgcccgccaccacgcccggccaatttttgtatttttagtagagacggggtttcaccatgttggccaggctggtctcgaactcctgacctcgtgatctgcccaccttggcttcccaaagtgcctcccaaagtgtaatcccaaagtgctgggattacaggcgtgagctttaatgcgtctcttacacgctgttttttaactgagagcccagcagcaagcagccttgagtctgagtttgtttgctttattagacagagtctggctctttcgcccaggctggagtgcagtagtgtgatcatggctccctgaagcctcaacttcctgggctcaagctatcttcctgcctcagtctcccgaacagcacctgggactacaggtgagcactgccacacccagctaatttttttatttttttgtagagatgggttctcaccatattgcccaggctggtctcaaactcctggcctcaagcaattctcctgccttggccccctcaaagtgctgggattacaggcatgagccactgcacctggccaagattttaataagcaactgagggatggggtttaatgatattttgcttcactgtattctttttcttcttctttttcttttttttggctaactttttctaatctaatactagatttgtatttatggtaatgatctaaagtttctttataagaataaatttagatttaagaaagttaaaatgttttttaaatagtaaggggatccagacagcatgtggacacggcgcggctcaggaaggtatggcagtgactggcatttggcaatcgctgccttgccccagctgccacaccgctgtgcctttgcctcgcctcgtcctcctgtttgctcttccatgctgacctcactgggctgccctggactccctctgagctaaagtcatctcccaaaggatccacagtaacaatagctgcccatgactgggacgtgggaaaggccaagcaaggaagtgaatctgggccggcttttttccccccaaggacaaggcaaggagagctcagtgctccaggaaatggagaaccacagaggggcagggacttgcccggggtcattcagcaagtcagtggcagaggccttcccaccctaaaacaatgtggacgggaagataaaatgggacagccaccacagagagcctttgatccagcaactgcgagttgggggaatttattctagagatataccaacccatgggtggaaatattgatctaacacagcaaatatctggaaactacccaaacatccatgtacaacaatggggacctgattcagtaaattgtggcacagctatataatggaattctacacaagcatttagaaactgatcaagttctgtacttggaaaaacatgaatagatctccaatatatacacagcaaagaaaaaaaagcaagattccaaacagtatgtatatgctacagtataatatgctactttttgtgtaagaaagagaagaacaggaatctatacatttgtttatattaggttgaacagtatgaaattgccattttataggccaaacctggtcaaatattagcaatttcatattttccatcttaatagaaagtaactggaaggaaaggaaagaaactacaaacaagagttgcctatggaggtggcaacaagatggggacaggaaaaggagatggactctttatagtaatacttttctaactgttgggttttgaaccaaatgaatgtatgattttttttttaatacagagtctcactctgtcacccaggctggagtgcagtggtgcaatcttggctcactgcaacctctgcctcctgggttcaagtgattctcctgcctcagcctcccgagtagctgggactacaggcgcgtgccaccttgcccagctaattttctgtatttttagtagagatggggtttcaccgtgttaggcaggctggtctcaatctcctgacctcgtgatctgcccgcctcggcctcccaaagtgctaggattacaggcatgagccactgcgcctggccgagattttatttttttttaataaaggaaaacaccagtagggcctcttagggcaggctttctgcaacatgacacctgtctttatatccatcccagctgggtggtcagggagaaactgtgcaggcctgagcccagggggcaccccagtttagcttctgacaaatcccttctagagaacctgctctgtggcatttcccaccctccacgtggtgggtcagagctccaggggcctccaccccttgggccaggcttctggcaaagctacagcaggtcctatgggatgatggttttggcaccaggctgccatgactttgtaggagcacccccttgccagacagggccacacgaagccagggctgatgggaaaagcacttcagcagcaatgcaataggtccccacaaggatacggcttggccaaaggtagctctgaaaacgcattcccaccgctgcccctccctcctatctggtcctatggcacatgtcctctagcagcctaaggaaagaggttctccctggggtgatcgctgggattatggaaacacctgggagatccccaccgagatctcacccttcaataacaccaagaagaatcactgaagcaagggtaatcgtagaataatttttttaagctgccactattgaatgactgtggtgtacagtatttacacaggttatatctcattttaccctcagtggtaagtactatatcaatttctaccacctcccaccgttggagaaactgaggctcaggaaagtgacatgcccaaggaacgagtgttatctaaccccaaagcctgtgctcttgaccgtgaatgatgtttgtgcctctgtctctccatctgaaagatggagaaggaggagacatgaaaacagaggtgcagtgaaggggctagagatgtggtgaccagggaagactcgggatattaaggtcacagtcttcaaacctctgcaaggatgttgagacagacattgctagctgctcaccaaatatccattctctccctctttcccactaacggaagcctaatttgttcagggaagcaacgcatccggctaaaaatattcaccttcccattctctacatctggggaaggtcttcacttctgcatggagagaagctgttgcatttggacctccgctgcctggaatgcagaggtgaggctaggtgtgcagtggctatttctgagtgtgaggacaaaagccaccctctaaggacagagggagggaaaggcagatggaggcgggtccctgagggcatcatggagctgccattcagcctagcacagcctctctgatcacatcatgtgagaaaaagaagcccaatgggtgaggcagtagaagcagttttttttttttaagagaaagggtcttgctctgttgcccaggctagagtgcagtggtgtgatcatagctcactgaagccttgaactcctgggctcaagggatcctcctgtgtagctgggactacaggtgcatgctaccacgcctagctaatatttttatttttttatttttatttttgtagagacagggtctcactgtgttgcccaggctggtctcgaactcctggcctcaagcaatcctcctgcctctgcctcccaaagagctgggattacaggcaggagccaccatgcccagccacaggcagcttctattacctgcagctgagcacagttctaactacacaatcctcaaggatagcaccaggacccatgggtagaaactacagagaagcagaaagtccttctggttttagcaaatccaaaaggcaaatctatcaaaagctgggctggaccatctcaagagatggcgagctccccatgcctggagagacagacgcagtgactgaatgaccacttggcaggacgatgggaaaggcattctgacattggctggggttggaccaaatggccttgcatgctttaatcatacccactttgggaggtgaggaaaggcccccaggatgtgtgcccagttatgtatgggcaagcgcatatgccctaccctgacctgcaaggcccccgaagccaccacccaatagaactttcagggatgaggaaaatgttctatatctgtgctgtcccagctatcgaacacttgatatgtggctgctgagactgagaaaggaaacttttcctttctttaacttcagttaacttaaatggccacaggttgctagtggctcccagattgtacaacattgccatccatccccgccgcctccccacgctctctccggccttttctcgcactgctgtcctccccctcactccacttcagccccactgggctcctcactgtccccagagcacgccaagcacatgcccacctcagagccttccctggcccctccctctcccgggcagctccccctgacgcagccccctggccagctctttcagctccgtgtctctgcttcaatttcaacgaggccttcctcagtgaggccagccctgaccacatattttgaaaggcaacttgcccgaccacaggctctgtctttatgtacatctgttgtgctgtctgtctccccagcgggagggcaaacatcatgaaggctggatcttcaggttttcttccccaagagcctaaaactttacctggcacagagcaggctctcaataagtccttgttgtatgtatttcaaggctgaaatgaataacatggagggtgccccatgctgtgggttcttcccattacagtgtgtttaaggcctgatattagtcagtcaaccaggcttcctgggtcacacatacctgctgggtgctaggccaggtgctggcacctgggactggggagccgggggcacataaaacaggaaacccagactagaagggagctcagagctcctctgaggaagaaacagtcaagctgagtgaagccagatgaaaagagcaggtgttcgtgagagagtaaaggaaaagcattttggacaaatggaacagcatgtgcaaaggactgcaggcaggaaagagaacggccctttgaaggaaacatggctgaaggcaaatgatggggagagtggtatgagatgaggccggtggggtaaatggaaccagacaggaagggacttgggggccaaaggaaggaatctggaatttctcctgaaagcaacacccccggtgcctgcctcccagctcctgtgtctacccctagtttcccccgtagctgtggaggcaagctccatgtaaggtcagactcacccagcactgtcagggtcccacgcaagcacagctgtccaattcctgcccagagcctgctctgaggctgcaggaggccccttcaccctctgccgcttgggaaactcccagtgaatgcggcactggagcccgcatccatccttcagacggacaatgctgcagatactgaggtctgagctggatccagtccccgtggtctgcagtgatgcctcaataacacacacctgcaatgcctgtccttcttccttctcgtgctccccgctcacgccctctcagctcctccctcctggcatcacctaccagtaaactatctgcacctgaatccttgtctcaggctctgcttttgcaggaaccttaactgagggccccatgagagttttgtatggcagcatggcacatgcaggctgacattttttaaagctcatgctggctattgtgtggagaagagtatgtggcaggaggaggcatgaaaagcagtgagggacccttgcagaggggcagtgagaggagctggtggccggcactgggctggtggtagtgaagagagagagacaaataggggatggagacaaagagggggtgcttgactccccaaagaaccagaggctcgagaggcaaggaggggtggcatggaggcaaggcttgggtcacgcctggcttcgggaaccagcctcgccaagttccatccctcaagccctgcctggctgtgaagacctgttgcaaaggggttatttttagagagttgggtgtttacttgaaggatttaaagacgggctttatttttaactccactcccaatggcagggactcactggtatggacttaggaagtcaagtggaagttggactgggctttggaaacccagaggagagaagcggcatttggggaaggatgaagcttaaaggagacagctggcctcaccacgttctactcatctcgggctccgggtaagaacgatgatgaaactgcccacggtccctccttaccaagcacccaccaaatgccacggccacatgaagccctctacaaacatcgcctcgtattgtcctcaccataaccttggggggacagggctgttactgtccccattctacagacgaggaaagggaggcttagggaagaccaaggacacttggtgggcaagtaacagagcaggatctgagcctcgattcctcagcttccccagcctgcactctcagtcgctctaccattcgaaagcatggccaggcaccgaggtctaggcacggagtgtcagcctgggagcagctgagagactttccctccccaccgtggtgaagatggtggagtctggctcagagaatcggaagcccagctgtgtcagttctcgtgtgagtttggactggttttctcatctgtgaaaagggctaatataataagtagcacctccttcgtgaggtttacatgaaatgagacatagaagggaactcagtgtagaggctggcaggcagtggtgagaagggggcactcagagatgccctgtccatgccaggcactgctcccagcactgcacatttatcaacaccaacatgaccctctcctaggccccacggggcaggttctctcatgatccccaccttagagatgaagaaatggaggtacaggaagcttagggaaaagccgcttgcccaaagccacgaggccagtgagagtgcaggactagagcccaggccctgaccctggcctgaactcactgaccctggggcagccactagcattctcatttttaccgttatatcaacactcttggtctgggcccttccagcactgatccgaatccctggggctcagctcagagccaggagcagggccaggcactggtctcactgtggggaaacacttgcatctgtgggagagggagatttttctcccgaaggtgcaggctgctggcctgtatgttctctgactctgctacttgggctgaaaagtaaagctggaccaggcgcggtggcccatggctgtaatcccaacactttgggaggccgaggtgggcggatcacctgaggtcaagagtccaagaccagcctggccaacatagtgaaacccccgtctctacgaaaaatacaaaagttagctgggtgtggtagcgtgcctgtaatcccagctactcgggaggctgcagcaggagaatcgcttgaacgcgggaggaggaggctgcaataagtcgagattccaccactgcactctagcctgagcgacagagtgaaactcgatctcaaaaaaaaaaaaaaaagtaaagctggcaacactctggagctaggccctaagcaccgtttatagaggtggaggagataaaaacattcctttccactttgtggagttctgtcctctttcatttgatttattaattgtgacccagaagccaactgaggcttcacgagagcctccctcaccctgccttccagccacactcctctctgctctgaccccgactccctgcacaaccctagctgggtctctgccctttggtaggcctcagttttttcatctgtaaaatgagcacgttgggcctcctctttcctaaggcaccttccagctctgaccagctttttctgaagactgaaggaagcacgctgggtcttttctctagtactctacactccaaggttggaaggcctggctccccaaaatgcatggtcaccattgttcttttttttttttttttgagatggagtctcactcggttgcccaggctacagtgcagtggtgccatctcggctcactgcaagctccgcctcccgggttcacgccattctcctgcctcagcctccccagcagctgggactacaggcgcccactgccacgcccagctgattttttgtatttttagtagagacagggtttcaccgtgttagccaggatggtctcgatctcctgaccttgtgatctgccctcctcagcctcccagagtactgggattccaggcatgagccactgcccctggcccacatggtcaccattgttctaacatctccttgctgcctgggacccaggcaagctcccctctctgcccagaccactcagccttccagtcacagctgcctcatgtatgtctcgagaatccggctctgacaactcaggaaattccattcactcctgcacctcagtttctgggcacaaagggactttgtccatctggtaattcacaaaggagggatgtggtgaagggcaggagtccggggtcgggggcctttccaatgcttcaagcccatcctcagggaattcagtctctcttagtggaacttcctacctatccaggcatctcaggaggtaagccagagacactgagaaaaaggacagacatagcctctgtggatatgggcagttgtttggaggagtgttgaaggtggccactgggttcacggaacaccagattttcttcaaaattttttgagtttggcaaagatgcaaaagactgatagcacatagctccagcagcaagggtgtgaggaagactgcgctcatgtacactgttgtgggggttataaattgcaacccttttggatgttaacttgggttctgataataattaaaatgcacattctttttgaccccaaaattctaattttaggaatttagcccataaagtgtcatctgcatctcctttgcaattattattctttaaatatttgttgaacatatactggagaggtggggtgagacactagatggggttggctggatttctgctgaattcactcaggggtactgtggaccctgtcaagaggaaccaaattgaccaaattgacattttgacagtaaatgtcaggagtcagtcccttgcaaaggcccacgtgaattgccattatattcccaatgtattccagtgctgcttgaatgtccctgatgggatacattgcctggctgggccattcctttaatcagccctgtgagcaaggatattggtccaaggctgttcactgcggcctcactggtgatcaagaaaacatgaaatgttttcagtctccatcaaaagagatctggttcaatgaatcatggtacctccacactacggactagcatacagctgctaaagggaggaagataaatctacatgcataacataaaaagatctcaaaacatattacatcaaaaacgcaagttccagaacattatgtaggtagtcctagttatgaaaaacaaaaacgaacaaaaccagaataggtaagtagaagaattctataagcaaattgtaaacaacggtcacttcagaggtgcaacccgggtggaagtagaacaggggatttattacttttttattttgtacgtgtatgaccttccttggattttgcgtgtgtaagatcttccttggattttaacgacagatatgttgtttagaacaatgtaagaaaagaagaaaggaaagagaaagaaactcaccgtatctgaagtagcagcacagggtggtggctcagaacatacgactcgggtccagaatctcagctctgtcacttactggctgtatgacttaggacatgttaaaaacaacacaagggccgggcatggtggctcatgcctgtaattccagcactttgggaggccgaggcgggtggatcatttgaggtcaggaattcaagatcagcctggccaacatggtgaaaccttgtttctactaaaaatacaaaaattagccagcggtagtggcacgcacctgtaatcccagcgactcgggaggctgaggtaggagaattgcttgggcccgggaggcagaggttgcggtgagccaagatcacaccactgcactccagccttggtgacagagtgagaccttctctcaaataacagcaacaacaacaacaaaaacaaacaaaaaaacctctctatatgcctaagttagaattagatgagttaatttagctgagcacttagtggccgccacatattaagtcctcaatgaatgtcatccaatagcgttggccattattatcccagatctcctgggattccccgagacagctgaggctgagtggtgggactggaaatggatgctgaggctgggtcagcccccatgtctcctgactcccgttccagtgctccttctgctctacgtgcctgcctctgtttctgacacaatggccttcccctaacagatgaggaaagggagtgtggtgaggaaacaaggaaaggaaacaaagggttcttcgtttctttcccacctgctgacaacgtcctggatgcagaaaggggaaatgtgttgggcgaaggcgacccgagctgccgcgtggccttaggttcgttactgcccttctctgtgtgtgggttctgggtatttcccctcccttctcccccacaatctaaggtgggcatctctgaacacctgcaagccccctgattcaacaccgggcagactgccacctcaacactctccttcctccaattaaaaaaatcaacaatcggccgggcgtggtggctcacgcctgtaatcccagcactttgggaggccgaggtgggtagatcatgaggtcaggagatcgagaccatcctggctaacatggtgaaaccccgtctctactaaaaaaatacaaaaacaattagctgggtgtggtggtgagcgcccatagtcccagctactcgggaggctgaggcaggagaatggcgtgaacctggtaggcggagcttgcagtgagctgagatggcgccactgcactccagcctggcaacagagcaagactccgtctcaaaaaaaaaaaacattctccctcctccaattaaaaaaaaaaaagaacacaagaaggacaatttgactaaccatgccccaggcttctggaagcccaagcccagcctcctgatggtgccaccaggccctcccttcccaccccagtggctctgccatgtttcatgtctccaccatctccccagatccctgcattagcctcctcactgacgcccagcctacagcctagcccttgccatactctcgctacaagagccatggtccaggtgtggtcatacacatttgggcagaccgctcccagctctcgtggctacccactcacaaagcggggcagggtagcatatagcacacatatatgatttctccgcctgcataatatttgtcgtgtgtgtgtatgtgtgcatgtgcatgtgtgtagccacacgttggtgagttttcctgcctggatgtgagagctttggggtttagtgacaggtgtgctaggcctccctccccatttccctgctgctccatcccactgcctgtgaccctgccctcttcttccccacctccttctgccctcttccccccaacccctgctcctaaatcaagtcctccaatttgttatacagagtacttaagaactggaagattttgtgcagggcacagtggctcatgcctgtaatcccagcactttgggaggccgaagcagtgggtcactcgaggtcaggagtttgagaccagtctggccaacatggcgaaaccccatctctactaaaaatacaaaaattagctaggagtggcggcgcatgcctgtaattccaactactggggaggctgaggcatgagaattgtttgaacctgggaggcagaggttgcagtgagccgagatcatccactgcactccagcctgggcgacagaggaaaaaaaaaaaaaaaaaaaaaaaaagaattggaagagttcatgctaaccggacattacatgccccctgatgtgatacaatatgaagtacacagaactatttattaagttttcatgccagaaaaatctaatctgaatccatttgagacagaatttacaggaagtacaggaaagagagaaacaagttaaacagcaccataaggaatcagcctgacaaatccagaagatgtcatgtcataaaaaaaatgaggaggatggttctagactaagagatttaggacacagctcccaacctgaaaataaaatttaaaaacaattctacttaaagtagcagcaaaaagaataaaacatttagaaataaatttggcaaaataagtataaaattgtacactgaaagctataaagcatcactgaaaaaagttaaagacttaaataaattgaaaggtgctccatgttcatggattggaagacttaaaattgttaaaaggacaatattcccccagttgacctacaggtttaacaaaatcccagcggcctttttttcccctgcagaaattgacaagctgaggctaaaatccatatggaaatgcaaggaactcaaaatatccaagataatcttgaaaaagaagaacaaaattagaggactcacatttcccaacttcaaaacttagtacaaagctacagtaatcaagaccagcctctggcataaggatggatgtatatagatcattggaacagaattgagagtctagtcaataaataacaacaaaaagacaaatacaggccaggtgtggtggctcatgcctgtaatcccagcactttgggaggcctaggtgggtggatcacttgaggccaggagttcaagactagcctgggcaacatagcaagacctcgtctctacaaatatatatttttttaattagccagttgtagtggcatgcacctgtagccccagctacttgggaggctgagatgggaggatcacttgagcctgggtggtggaggctgcagtgagctgacatgacaacactgcactccagcctgggcaacaaagcaagaccctatctcaaaaacaaaacaaaacaaaaagataaagtaaatatggaaaaattgctaataattattaaatccagttaatgggtacttgcgtgttcattatatcactctctctatttatatatatgtttcatattttcccataataaaaagtcaaaaaatggaaatttttataacaaaatgcaaatctctagttcatcttggaaaatcaagagttggctgggcacagtggctcacgcctgtaatcccagcactgtgggaggttgaagcgcatggatcacctgaggtcaggggtttgagaccagcctggccaaaatggacaaacccctcctctactaaaaatacaaaaattggctgggcgtggtggcacatgcctgtaatcccagctacttaggaagctgaggcaggagaatcgcttgaacctgggaggtggaggttgcagcgagccgagatcatgccattgcactccagtctgggcgacagagcaagactctgtctcaaaaaaaaaacagaaagaaaaatcaagagttgtgctaacattaaatccatgtttctctggggcagccattagctaggaaggggcagcttcccccaagagggcttgcagagaccggggagacctggttcccatggtcccaccaccctctagtgagtaggacacaagcctgcggcctgcctggcccctggaaccttttagcttgtaacgtcagactctcactccaccaggcattcaaagcccgtactaacctggccctgggctgccttctcggcctcatctctaatctttccccacccattccagcattctggatgactcattgctcccaaaatacatcacgcacattcctaccttcatgtctttgcacatgctagttcctctacctggaacgacctttctctctcttttccacctggcagactcccaaccagaggtggcccctgcagggagctttcccagacctcctctgggacagctagttgctctttctgttggaccccatcaatttcatctccttcctccctctccaccaccaactgtccaatccctgcatggcttcgccctcaacgtgggggtctccagaggacgctgcccacactgattcaccactgggtgtccagcgccctggcacaagcctggcacagggtaagtgcttcttaaagtttgtgaaggaaaaccaaccgaaggtcagatcgtggttaagagcattctagaaccaggtcacctggcttcaactcccagctctgccatgactcagctgtgcaacctgtttgagaaacttaacctgtctgtgcctcagttttttcatctgtaaaatgagaataacagtaccttcctcacagggttgttttgaggattaagtaaattaatatatccccactgggcacggtagctcacatctgtaatcccagctcttagggagactaaggcaggaggatagcttgagccaaggagttcgagacctacctgggcaatatagcaagaccctgttctccacaaaaaagggggaaaaaaagttaatacatgtaaggtacttaaaatcatgcccggttcccagaaataaggactagatgaatgcatattaaataaaaattaaataagcaggctcaaagatgggcaattaccaagaccctccctgagacctggtccagtgtcaggccctcttccctctggtgacctgtgtcccccatggtgtggaaatgagtgttggcagtgcagaatcacagcctgaagtgacaccaagtccattttgctcattagttaaggaaaaggcctccgtgggtgcctacggctctttcataccagtaaatctcttgccagtttctcttttaaacaaaaagaaaacaaactttaggctcagtgcctttgggcatcaatagtttgatgtggaacttgaatagcattgttctgttttcagaacttgctgtgatattgatttcgcattttcaatagtgattagaaagtcttccttttcaataaatgtacttacgtatttttaagtaagttgattcaaagatgaagattaagacagtaagtagagatggtgtgtgaaggtaacaaaaactgggactggggcctgcagaagatgaacatttgggaagcacagttgtagggactgagagagaagacagggccttcccttggggcaatttcattcttgggttagtacagaatgacacaggattgataataacagcttacacctccttgcatgctttccaagcaccggccctttacatgagctacttcttttactctctgcagcattactttcagggaggaggtaatataattcccatttgattaaacaggaaagtgagcccagaggggtgaggtaacttgcctaaggtcacacagtttataagaggctgaagccagattcaaacctaggtccatccaatgccactgcccatggactacataggttcctgctcaccagagaaattcagctcccagcaactcaaaaaaccaactctaagctatgatcagcttcggagtttccagagccagcatggggaggagatggaggtggggggctgaggggatagaagacagacagatgccaccctggtacaaaacctgagatgctccaaacctcacaccctaggacaactgagaactcagggccatgccctgcctctgccacgggggcacaacagcaggaagactagacaacagcaatggcagctgatgcttacagactacttcctgcttgtcagccctgtggcgtgtgtatatacccttcgtatagaggctctgcttcaaccttgtgaaaactctttgaggtgcgtcttctagaagttagaaatttgaggtctggcgggaagaaaagatatagcaagcaaggggctgagtctaagccttactcttaacactcactgtgctccttccagaaaacaagcatttgtcagggtgttggcatgacaacctgaaaactttaggcgcctccccaaacataccagcttccctccacaatccagtatctatgaccttaaaaggcatcacaaaagagttcttagctacaaaatcagaagacataaatctagttccctctcgatcgctttgtggctgtgagtatatctgtatccttttctgcacctcagtctccccaactgctcagtgacagggttgggactactctgagggcctgaatgggtctacagcaacactgtccaataaatataacatgtatcacattgtaatgttaaatgttctagtagccacattcaaaaaagtaaaaagaaacagtgcaattaattttaataatgtattttgtcaaagctgatgtatctaaaatgtaaccatttcaatatgtaatcaatattttaaaaatgattaataggttactttacattcttttcatactaagtatttgaaatccaggatgtttcacatttacagcgcatctccatttggaccagccacattccaagtgcccagtagccatgtatggcaagtggctaccatactggacagcccaggtctagaatctttttcaatccatagctcattttacagggaagagctgtctcatctttctcccttctcttagaaaagatgtcctgatcgtagcctccgggctgacaaattccacatgagcccggagggaggagctggaagccacaatggagagaaagcccgggcctgcctgggtgtgaagaggctgtggctgctggggatgctttctgtctctccacagccaaattactcatgaagccccagggatggggagagtccctgcggaagatggccacaatcctgcttttcctcctgaccccaaaattcccttaattggaaattcagtctgagcttgaaacccatccaggcagccacctccacccatggcaacatctccatgggcacgcaggactcctgccccagacacacaaggaatccaatcccacagcagcacctcatgcaagaggctggatcccagcttctcagtccccaggctcacttcccggctgtgggcctggcagccttctcggtgggagctcaaaacctccacatgcaggggcacaggcattggcaggaaggaccaggagggcaaggaaaataagggggcatccctccttctccccagacttccacttcctcacctttaaaatcaaatgttgttagatcatagcaatgattgtctttatgctggctgccctgtgccaggcattttacaggcattagctcgcatactccttctaaccaccctatgaggaaagaggatcccagggtcagagtggtgaagcaacttgggcaaggtcacacagctcttcagaagaagagctggggttccaattcatggtcttctgaatcaagaacctaagctccttcctgctgtgctctgcctaagtggcccagggtgttccaggacagtccgagcttacacttgtcataaccagatatatttagtgtaattatttaaaatgttccctttggaagaaggagcaaatcttccatacagaggaattttaaataatataggtagatattcccccctccaaaaggtgtgcctgaattccagacccttctccctcttgagtgtgggctgcactgagtgtctgaattccaaaggatggagcgggaaaagaggaaatagtaactgtacatcagagaaacctggctgacccaccttagccaagtgatcaaagttaacatcctcagtttataagaaacatatcagacaaacccaaattgagggacactctataaactatctcaccagtactcctcaaaactgttgggctgggcgtggtggctcacacctgtaatacgagcactttgggaggccaaagcaagaggatcacttgagtccaggagttcgagaatagtctggccaatatggcaaaaccccatctctattaaaaatacaaaaattagccaggtgtggtggcgcacacctgtggtcccagctactttggtgactgaggcacaagaatcacttgaatccaggagatggaggttgcagtgagccaagatggcaccactgcactccagcctgggcaacacagtgagaccctgcctcaaaaaaaaaaaaaactgtcaaggacacacaaaaaaagcaaagaatcagaaactatcacagaccaaagggaaccaaggagatctgacaactaaatgcagtgtatgatccttcaggaaatcctgaagcaggaagaagacattgatggaaaaactagtgaaatgcaaataaagtctggagttcagtgaagagtcgtgtgccatgttggtcttgacaaatgtattatgataacgtaagaagttaacaataggggaaaatgggtagagtgtatggaaactctttgtattctttttggaacttttctgtaaatctaaaattattcccacctaaaagttttatttttaaaaagtgctcccttttactcacagaagtgttcaggtttagacaataaattatatgagcacctggtcataagcctggtcctgcctgtcttagaccatctgtgccactttaacagaatacctgggaccgggtcatttgtaggggaagtccaaggtcaaggcaccagtgggttcagtctctggtgaggccattgtcttcctccaaaatggcacttcgcacactacattctccagaggggaggaaggttggatcctcacacagcagaaggcgggagtgccaagagacaaaaaggggtcaaactcaccattttataagggatttaatcccacccatgaggattaatcacctctcaaagattagtctcagaactaatcacctcccaaagttcccacgtcttaatgttacaatgacaattaaatttcgacatgagttttggaggggataaacattcaaactatagttgcctctaaccaagatgttttaagaaaatcacccataccttctgtccccttcagtgatgccaacggctcacacacttatagcagtgtaaagtttacaaagtttagcattagcaagatgtgctaaagtttttgaatcagaaagctagaggctgatgcttgggttctcccacttgcttgccaggtagtcttgggcatgttacattcattccctgggcctcagtttccatgtctgtaaaatgaattcattgtacgatgacaatgactagtcatatttttcaagccatgtctggtgtccgacactgtagtggtgactctgatgggctacccagattccccttcaggactgaaggacttatttctcccactcccagctactcagagagttgccagctgtcagccctctccagggattgcccttggctgaagagagctgtccagccctagtcaagcctccttctggagggtagcctgcatacaaatgaggagagtataaaagatccagctccctcatcccaacttgcgatgaccttgaaggtcatctccactgcagagcatcccttatggttggctgaggctttgttgagactgtattgcaacccaatgtctcccaccgcccagtccggccttcttcccttccccacaagtgttgatccagagggtgctccctgtacatttcctgcatgttaatcttcatctctaagtctgcttcctggggaactcacctcacaataggattgtgagccacctgacctgcactgtcgttcctaacccttagaccaacttgtctttatagatgagatcattgagattagagaagaaaatggatctggccaaggacatacaactaagaaatggcggtgccacagatggagaaactgacactcagacaggccaactgatctgcccacatcaacgagctaaaaaaatggcaaggccaggatttggccctaggcctgcttaactctgaagaccatgtgcccagtctcctgccaggccatttacatcctcaggaggattgctgcagccccaggacaggcgattgccttttaccaccctcctgccagaccacactgctgctgtccctgctcctgtaccccacttttgctgggttgaaaaggttgaaaggggtaccccactgctgctgtaccccaccccaaatttgcaaaatgagaataagaacagtatctaccttttcaggatcttgtaagagtaaatgagttaatataggtaaagacctcagaacagtgactggcacatagagaatcctatttaagtggtgggttaaaaacaaatcatgtaagtcatgtaaagctgcacctgtggcgcgctctaaggacagaacggcagctgccggtggacctcatccgctctctaagggagtcaggcttgacctgagccctgaaggaggagtagaggttaagtgagtggcaaaggaaccagtatgaacaaaagctctgtggcaggaggaactaaagaaggaagaactagcacagagggaagaaaactccaggctcagggaaagaatgacaaaaaataaggctgggtaggagggtgggaacctgattagaaaaggccactcactaactgagtgattttggacaagtcaccttatctctctgagcctcacttagctcatctgcaaaacagaaataaacacagtacctatcataaggttgttaaagggactgagtgagtccatatttgtgaaccacttaaaattgccttgtacctagtaggtgccataaatgtttggagacaacattagaactttatctgaagcacaatgagaagacttaaaggggtttgaatgtagatgatagggtgggtgtttagtagatgggagggtggatggacgcatgggtagatggataggtgggggaggttgaatgaatagaagtttggttgagtgatagaggtggctggctgggtagctggatgaccaggcgggtgggtgggagtggatgttgttttaatgaacagaagtgtcgctgggtggataaatggaagtacttgagtgaatggatgcgtggctggatgttaagatgggtggctgggcagctggaagcagctgagtgaatgcaggtgattggtgggtgaggggacgggtgagtggttgaaagggtatctgtatgtttgaatgggcatctgggtagttggacgggtggttgagtcgatgaatggatgggtgatgagctggttgagtaggtaaaaggatgaaaaattgggtaggttgcatggaatagataagtaaatctttgagtgaatgggtggttgttcaggtagatgttaggctgttgttcaggtggatgttcaggtgtgatgtgggactggaggtgggtgtgtgggtggaggggttgttcagtgagtgttagagaagttagtcaatgaaggaattgggtggatttggatggatgtttgggtggttgactgcgaggttgtgtggatagatggatgactggatgactgggtgggtaaacaggaagtggaatgggtaggggaatggagtggatgactggagagatggctgttcaggtggatattagaaaggttgggtgagtggtagggttaagtcagtggaagggctgggtgtaactgagtgatggatggatgggtgagtgaacaggagccaccagctcccgaagagcctccaattaacccctgaaggtgatgggggtaaaagaagcagaatcaggcttggagacagggcctcctaggttgccctgccccaggacccccttctccgaggggaggcgaccccttcccacccccaccgctgtcctacctggaggcggcaatctcggccttctggcgcgcgatagcagcggcgcgctgggcaccctccacactgtgctccactttctggcggaccttgttgctcttgagctgcagcatgcggcgcttggtgtccttgaccagcacgttgtggcggtacttgccctcctcgcggtggccgtcgggcagcgtggtgcagccatagccgtggcgcaggttgtccagccactcgccctcgtagcggaggccactggagcgttcgctcacgccgaagcccgagcgtttgtcgttcttccactcgcccatgtaggtctcggtggtggtggcgtcgatatcggcctcgaagggtgcggcctcgtcggcgccctcggcggcctctcccaggctggcggtggacgcggcgtcgctggcgcccgagctgaggtcgctcttaaggaagctgacacggctgcgctggctacccacggacgtgcgcgactctgcgcgccgcagcttgcccagcagcgcgccccgctggaagaggccgccgcccttgggcgcccgcgcggccgcctcggcattggccaggaggctgagcgcgaagccgccacgcgggatggcgggcgagggcagcgcggggccgtcggaggccggcgaggcgggagagtccggggccaccgtgccgttgctgtgctcgctgcgcagggacgacagcgacgtgcgcagcggcgagcgcaccaccacggccatcccgtagggcacgctctggcgtactccgtagccatggcgcatgccgttggtgaactggccttggtacgtccctgcgggcgaggagagggcgcgtcagtaggcggcacgacgggtccccgcgtgtgcacggtggcctgggagggcaagggcgggagtgggcaaggcggggtgggaccgagaggcgcaaggccgtctgagggtcagggtgcacagtgctatgagtgtttgagtctactcgagtgtgcaataacacgagtgggtgagccaggaggagcttgcacgatggtaggaatacgttggtgggaacatggcaaggtcacaagtcgtgaacggataagctagtgagttcgcatggtagtgcaaatgttggagagcatgggcttgtgtgtgtatttgtgcaagatcgtgcgtacaagacacttgtgggcgtgcatatcggtgtcttttgactatatgagatcatgaggtgggggcaggtggctcacgcctgtaatcccagcacttgggaaggtggaggcggatggatcgcttgagctcaggagttcaagaccaacctgggcaacatggtgaaacctctctctacaaaaaaattagtcaggcgtggtggcatgcacctgtggtcccagctactagagaggctgaggtgggaggatcacctgagcccgggaggtcgaggctgcagtgagccatgattgtgccactgcactccagcctgggctacagactgagaccctgtcacacatacacacacacacacaaatcatgagtgtgcagggtagtgtgtgcacagtggggtgagtgcctgagatctcacggagttgacattatggatgtgtatgaggttctgagtgtgcaaggctatcagagtgccaaagaacaaagtaatatgtagcactccaggctgagtgtgtgaggtgatgggcatcagtgaaaccgagacactgagaccgtatgaaaccatatggaggaaggctagtggtgtgtacaaggtgtcggcaacttaggccctgcatgtacacaagtccatgagctcctgggattaagatgccttatgttagcagccatccaagtcttatgtgtgtggagaggcagcagggagtagtggttcagagcacaaactccagagccaggctccctgggtccagatcctgcctctgcccttactagctgtgtgaccttgggcaactgacttaacctccctgtaccttagcttccttatctgccagaggtaataactgcctcttacctcctagggtttttttttgaggtttaaatgagttaatgtctccgaaaaactctgaaagcaaagatatgtgtgtgatactgtgattctacaaagttgtgctcacgtgtgaggtcacctgagttgtatgacaagctgatacacagctgccaaaataacttcatccttcacccccatcctgacatgtagttctccccagggctcatccaaaaaccttctcctattctctctagatgactgcacatctagtgtttttaaactgccatttatgtcctgctgacctccccaaatatatccccaacccctccctctcccttcggtagctccagatgtcaccttggaaatttgtgttccctcagatggtacacagccacctccagctcacatctgccctcactcaccccacacacacacctgggccacagtcctggtctttctttcccacagcagtgctgctgaaaggcagttctctgccttcgtctttgtacctccaccatgtagaacggtacctgatacataacgttcactgcaccgaaggcagaaattctgaggcttctttgttttaaacacaagctgatacattctccctagttaacaaaaaccaaaaggtcttcctgctaataaatgtccaggagcaagatggctgagtagacaaccaaggatgggactcctaaactcaccccagcagatctgctgttgcactgctcttccctcttcctggaactcttttcctccagatatccttcaagtctttgctcaatgagacctactctgaccccctgtgatggttaatactgagtattagcttgattggattgaaggatgcaaagtatcgatcctgggtgtatctgtgagggtgttgccaaaggagattaacatttgagtcagtgggctggggaaggtggactcacccttaatctggatgggcaccttctaagcagctgccagcaaatataaagcaggcagaaaaatgtgaaaagcctagactggcttagcctcccagcctacatcttcctcccatgctgctggatgcttcctgccctcgaacatcagactccaagttcttcagctttgggactcggactggcttccttgctgctcagcttgtggacagcccattgtgggaccctgtgatcgtgtgagttaatactccttaataaacttccatatatatatatatatatatatatatatatatatatatatatacacacacacacacacacacacacacacacacacacatcctattagatctgtccctctagagaacgctgatgaatacaccaccctgtttaaaactgcaatctgcttatttcacattgcgtgcctttatcaaaacatctcatataccccataaatatttaatatatacatccattatgaacccacaaaattttttccaaaattgcaatctgcctgcacccccaccaccctgctcacttatctacttttccttatttttcccatagcacgtatcaccttctaacataccatatgacttatttattacattaattgcttttctccctctgctaaaatggaagctccatgagggcagggatcttttctattttgttcttggatggattccagaacctggaacagtgcctggtacacagaggtgctccgttaatatctgcaaaatggctgactgactaaacctgttcaaaaattccatctcattgggtgaccttggcaattccttttcttaacacctccattgtctgcctgtcaatgatgtgttgggtgaagagctctccaaggcttgatctaactctgagatgctgagcttctaggaattggtgcactgtaactttggaggcgaaggagggcacatctagatgcttccacactgcctggtccctcccagcacattgagctcaggatcccacttctaccccatcctacctcttctgcatgaagagcccccattaaggatcaagaacccccattaaggatcatgtacaatgccaggggctcactaaacctctcaacagtcctgtgaggtgagtcccatgataatgcgaatttccaggaggatgctggtgatctgagaggttaagcaatttgaccaaggaaatgggatccaagcctaagcctgtctgatgccagagtgtatgctgcgagcccatggctcttaatcctggtgtgcattagaagcaccagtgaaactttaaaagaaaacaactgatccttgggctttaccaccatcaattcctgtttattctgttggaaaaggtccctagtgcttccagcccctctggacagcaagaaagaacagccaggagggagagacacctgggctctgttcccttcaatgaccagcctcaaaaaaccaaggatcatggaatatcagcaataaaagggctaaagagaaatggagagagacagaaatggagaagaaagcattgggcatgatctcatagaggaagatgcaaatatgacctctatttcataggtaggttgatgttcagagaagttatgtgacttgcccaaagtcacacagtgagaaaggagcagaactgggatttgaactaagatccaacttaagctaaggaagtggaaaatgggattgtatgacaggtgcaatgaacagagaaatgggaatgtggtatagctgatgaaaaatgggaagttggatagatgggaaaccaacaggtcgcatttcccaagctcattcacatgtgatcccattggatggaggctgaggacagaatggaatgtggagtcatcctggcttcaaatatcatctaagctggggaaccttgggcaagttccttcttttgatcttagtttttttgtctggaaaatggaaaagtaatacccactttccaggggtcttttgaggattaaaaataagacaacaaaaaatggaaacaattcaaatgtcagtcagctggtacatggataaactaacacagtgaagtgctagaaaagagagtgtgctagaaaagagaagtgctagaaaagtgcaagaaaagagagcaggctgctgttacacacaacacatgaatgggtctccaaaacatgctaagtgaacaaagctagagatgaaagctgtgtgactccagttacatgaaagcctcaaaaaacaaacaaacaaacaaacaaacaaacaaacaaacaaacaaacaaacctatagtgccagaaagtggatctgtggttgccaggggctgggtgtggaaggaatagaatgcaaaagggcacagggaaacttcctgagttgatggaaatgttctgcaccttttttttttttttttttggaggtcgggggatggagttttgctcttgtcacccaggctggagtgcaatgttgcaatcttggctcgctgcaacctccgcctcctgggttcaagcgattctcctgcctcagccttctgagtagctgggattacaggtgtgtgccaccacccccagctaatttttgcatttttagtagagatggggtttcatcatgttggccaggctggtctcaaactcctgacctcaggtgatccacccaccttgcctcccaaagtgttgggattgcaggtgtgagctactgcgcccagccaaatgttctgcatttgaattgtgctgatggtttacacaagcgtgtacatctgtcacacctgtacatttcaaatgcattttatcatatggaaattacaccttgatacagttggtttttgtaatgtaaataaataaattgtaaagaagcttttcaggaaaaaaaaaaacaaaaaaaacaacccagcatagcattctgcaaatatctatcaggaaagtcatcagctctactttccaaatggatccagaatccagccgcttctcaccacctccacttcgactagagagtggtctgtgccaccgttctctctcacctggattttcatagtgactgccatactggtctcctgattccactcttgcccctctatccatccctaacacagcaatcagagggattttgttcacatgtgttaagtcagattacgacactgcactgacccttctcactcagaagaaaagctgaagtccttagtgacccacaggccctacctgacctcatccccattcactcctctgtgctcctctcccgccatcctcccctttccctcactgcactctagccacgaagactgctttgctgctgcacaggggccatggaaccacctcagggccttggtattgctgttccctctacctgtaatgcccttcctccagatacctacatggctcaccctcttgccgtcttcaagcctttactcaaatgtcatcttctcagtgaagccacccgtggccaccctacttacgattcaacccgtgcccaaggtcttctatctcccttccttgctttatttttcctagagcatatctagtgcaacatacattttgctttttcttgtgttattgaccatcccccctcactggcatgcgagctccttaaaggcaaggattcttttctttttttgttcactgtggtatcctcagtgcctcgaactgtgccaaataggtactcagtaaatatgtgttggatgaatgaatgcatgaatgaacagcaggcattccgtaactgtttattctcttctttctgttttgtccatctgcaaacagctctgtggaaatgacagctccggggaggtattttatggttcctgttttacagatcagaaaaaactaaggcccatcaaggacaaaggactcatccaagatgacacagctaataaatatgccagagccaaactcacatccgtgtctggctatgctcctctacttctcagaagaaatttttaaaaatgaaagggaaaagtgaacaggcagagagcagagaagatggtaaactgggagaaagagacaagacatctaatctctgggttggacaactttatgaaattaaatcaaccaacctacctttagcttcagtttggcatgagatgggctgatgtagtccctttaagcccaagaaaaactgagattgcaacaggagagcagctcttggccaccagttgggaaggaaacagtcaggctatattaggaaacttacaagcaagtggcaagaggcacagacacccaggggaggctgggagtgacagggccctgggaaggggaaaaaccgactcctgaggccacccccactccaactccctccaagacaggacagttctccctggagacaggaagaatgcatccacagagggagagagggaggccgctgcccatggccatctggctgagaggggccgtctgcagaaggaagggcctcctccgataccctttggactgcctcctcactgagctttgtaaaccctgcagggcttcccactgtcccaaaggaaacgggggagatccccaacagcccacaaaacctggcaggggccgcccctgccacctcccctgcctcatcttggactgctcaccactcacactcgccttcccaccttggggcctttgcacaagctttccccatttcttcacatgctcttctcttccctcttcccctggccaacttctattgacagttctagctttggcttaaacgtgatttcatccaggaagatttcttgagccccattccctgagtgctgctggaaacagccacatgttatcatgtcatccatttttcttagcactttccacaggtgccattgaataattatcatgaccatttgttcaccagaagcctcccctgcttgtctttgccttccaagagggaggaagctttgtctaccttattcttgctaagatgctaagctcctggcatctagcacagttcccaggcccaaggaaatcctcggtaagcatccgatgaattttcaagtcttttcctgaatgacactcttatgtcctttgagaggcaggaaacccatcttttttccctcatgactcggcatgcagtaggtgctcagtagtggacagcactggctgccaagggtgttcaggtccagattcagcagttcaagccctgggagttattggtgtacatgtaaaatgctggtgaaggccataaccatggcaaaaatacggtcctgtccccccgataggactcccgaaattaataaaacctaaatatagccttctccttgcagttgctcttctggtgagtatagaataacagggatttaagtctaaactctgacgttgaatagttctaagacatgcataaactatttaagcctgcggagcctcagtttgtcattctgtaaaatggaaatcatgataccttcttcatctggttgttcatacaaccctttgcatttgacaagctagatgaagaccatgcattcttctagctaggtgctgggatacagccgtgaactaagtggacatgatcgctgccagcaaggggctcagagtcttgtgccagggatagactaaatataattaaccaatcacagaaataaatgcagccatggcagcagtccagatgagaggtgatgccccaggtcttgagtggcagggagtggggagggtgggttgaagattaaataaactgtgtgtgaggcagctagctcagtgcctaggatatagtaagtgttcaataaaccctagatttttgacaggtcagagtctttgcccagaaaggattaactggaaagatgaaaaggagccacacagaagacagagagagctcaggaagaaaatgagaccagctccaattttctgcccggtttgtaagttgtttgtaagaaagcatgtttgtgctctggaatactcagattttgaatattccagaatttttaaaaattcacacaaaaagaatggaaaatatctcattaatgattgtatattgtttacacacaaaaaaaatattgtggataatgagttaaataaaatgtattattaaaattggtttcacctttttaaatatggctactaaaaatttttaagttacatacatagttcatattatacttccattagaaagttctggtttaagtcatttggagttagggttttccttgacctgcagacaaaagagtatcttaatggatacaggtaacatcattttgattttacagttggaaaagccgaaactaagaattttaatgacttgctcatattaacacaatgtggcagttgttggcaatcacagccaagcgtcctgactagtgctttcacctctaagaatatgagaacttcccttacaagttaaaagttccaaaattctcacccaaatctcagctctgaagaaagcgtgaccatttcggaaatgcaagtgctatggttcagatgtttgtcccctccaaacttcatgttgaaatgttatcctcagtgttggaggtggggactaatgggaggtgtttgggtcatgggggcagatccctcatgaatagattaatgccctcccttgggggtgagtgagtttctgctctgttaattcccacaagagctggttgttacaaagagcctggcaccttttcactctcactcttgcttccactcttgccatgtgatctctgcacacaccagctccccttcaccttctgccatgagtggaagcagcctgaggcccttatcagaggtagatgctccaccttgaactttccagccaccagaatcgttaatcaaataaaccttttttctttgtaaattacctggccttgggtatttttttttttttttttttttgagatagagtctttctctgttgcccaggctggagtgcagtagtgtgatcttggctcactgcaaccaccgcctcctgggtttaagcaattctcctgcctcagcctcccaagtagctgggactacaggttcctgccaccatgcccagctaattttttgtagttttagtagagacggggtttttcactgtattggccaggctagtctcgaactcctgacctcatgatccgcctgccttggcctcccaaagtgctgggattacaggcatgagccaccacgcctggccctcaggtattcttttacagcaacacaaaattgactaagacaccaaggaaaagctgggagatccagaatccagtttgagacatcaaagagacatatgggccagaccaggattctgcctccaaatacagaatggacactgagaacaccatcccatctggccagtgacaccttcctatttccagggaactatctgaggttggaagatcagtgtgcctcggtgctacggtttaatgtttgtccccctaaaaagctcaaattgaaacttaatccccaatgtggcagtattgagaggtggggcctttaagaggtgattaatccactcatggattcatggtttaattggttatgggagtggggctggtggctttataagaagaggaagagagatctgagctagcacactcggccctctcatcacatgacaccctgtgccaccttgggactctgcagagagtctccaccagtaagaatgccactcctgatatgaccccttgaccttggactgcctagcctccagaactctaggaaatacattttgtttcttataaactacacagtttcaggtattctgttataagtaacagaaagcagactaacacactggagaactgaacagagatggagagaaggaacgaggactagctcctttctaggagtccccattgcctatagaagtccttacctgatagtccagttccttcatgacctggttccaagtcactttctcagccttgtcttcccaaatccttcatagcccagtttcaaaccacctccttcagggaaccaccttccttcctccaaattctcattgcccaagacatttatcacttcttacttcccatggcagctctcttgtctttatcttgcctgttttgtctaccagccatcgctgatccttctccaagtcctctcacatagtaccagatgttggcataagatctttgggtggcccatagaagtgtcatcaacaaatttcagacagtgtttaagatggagcatggcagatacagagtgagcatcagagagtccaggggttaatggctcttgtccaagcataccaagatcagaccaggtgaaccagaaatgctcactgtggtcagcacacatgcccatgccacagacaccacacagatgctcctgattataagggactcatagcttggctctaacccaccttgataaagactatggacccagcatcccagagaaagtaagccagggctaagacagctttggaggtagcaaagaataatggaaatcacatggtcttcagatagacctgactctgaatatctctttaattttgctcaatatattgttaaaatgaatagataagaaagtatcctaacagatacaggcatcatcatttcgatgttacaattggaaaaactgaaactaagaatttaaatgactctcatgatgacgcactgcgatactccttaattctcttggtctccaccctatctgtctagtccaagccacatccttttctccctcgatgatgacagtagtatcctccctgccccccacttcagttgaccctttgctgctgccactcatcttcttcataagatgcaactctcagcaggttactccccatctcaaaaccctgcagtaacttcccagtgccttgaggagtgtctcaggtcaggatccctagggaaaagattctgaagctgagatgatgtgtgggagatttagcggggagtgctctcaggaagagcacgtgtaaggaaggaagcaggatttggcagtggaggaagctgaacatctgcaacagaatattcaactgatcccagggggatttaagctggtatagcccttcagcgttgcccaaaatcaaagcaagggggccaggtcattacagtcattagatgtgaaggaggcagctccctttgttggagagaaatacccagccaggatctgtcagctgctaacactcctggcagctcggggaatgtgtccctggtcctaaggagtgtctgaaggggtagcctagaatctactagaaggatgaagttcaagctcctcactgtgacccacaaaaccctcatgatctgggctttgccaatctctccagcctcgtccaccccactctctctctctgagtctgtgctccagccttttctggaacacagcatgctcaggtcccacctccaagcctttgcatttgctgtcccttctgcctgcctgtgcggcctcccctgtcacccagtttacctctattcatcctgcatatctcagctcaaacatcacttcctcaaggacgccttctctgattatcagaccagaccaggtttccctgttatcagttcataaattcttctatttttccttcaaaatatgtatcacattttgtatttaagtaattgttagatgccggtctctgctgttaagatacatgcacttgggggcagggacaggtctgactcgcccaccacagcatccccagcactccatgcagggactcacacatggaagacattcaacagatactgtcaaatgcattaataagcacaggctttgaataaggtctctttgagtctgtctcctctcagtaaagtgagcatagcaagtttcctttgcaaggttgctgtattacatggtttatctagcagagatctcgggctctcaacaaaggttggctcctttcacttcatgggaaaagactgtagggtgaccagtcatcccagtttgcctatgtctgagaggtttcctgggatgtggaactttcagtgctaataccgggcagtttcaggcaaattgagatggctgatcaccctaaattggggtgagaaggaaaaaggggcatttcatattagtacaatagtcaggatatagtagcaaaccagctctttaggacaaaccaaccaaccaacctcagtttgtactattagtcagtttccactgtgtaaatacccccaccatgactgcaaagttcctgagctctcatgagccagtaggagctggctctagtaacctgtatgtgtgtatatataaatattttttgttttgttttgttttgtttcgtttcgagacagagtctcactctgtaatccaagctggagtgcagtggcacaatcacagctcattgcagcctcaacctcctgggctaaagtgatcctcccacctcagcctcccaagtaactgggaccacaggtgcataccatcatgctggctaattttattttttgtagagatgtggtctcgctatgttgcccaggctgctcttgaactcctggactcaagcaatcctcctgtctcaacctcccaaagtgttgcaatcacagacaggagccaccaagcccagctcaataacccatatttaatatgagctctcaggtttctattgcaaatgtgccacacagccatagacaacctcaactgtggtgcaagtgagaatatttcaatcctgagaaggtcacagctggagtggagcttggagattaaaaccgcttttataaaacttatgacagtgaaaaaaatctgacataaaaatatttaacagtaaaaaaaatcgatataactgactccatcttacttctaacctcacaagctaactgtcttcactcatgcctggacatagaccaaactaactattcaaaaattgagttaatagtttaagacaaaaataattaacagtcctttcttgaaactaaccccctctttactcagtgaccaaaactgcctttataaaattatgactccagagaaatatagccagaggttacagaacttgtaacctccccagcgactcctatagataacatcactactgtcaaaacctaaaattggcctttaaaatattttttgaacttttacattctgacgattctacccagacctgtgactcatagcaaaaaactaattcaaccagtcctataacccccaccccgaaactgcctcagtataaaaaagccagcttcgacttcctataatttcatccccaatccaaccaatcaacatttccctctccctagccccctgcccgccaaactatccttaaaaaatgctaccttccaaactttcagagacataaatttaaataataaacccccatcttcccacttgactagccctacatttattaaactcttcctctacgataataccattgtcctaataagttaattttatccatacaacaaacaaacaaaggctgggtgctgtggcttacacctgtaatcctagcactttgggaggccaaggtgggtgggtcacgaggtcaggagttcaagaccatcctggccaacatggcaaaatcctgtctctactaaaaacacaaaaattagcctggcgtggtggcgcatgcctgtaatcccagctactcaggaggctgaggcagagaattgcttgaacccaggagacggaggttgcagttagccgagatcgtaccactgcactccagcctgggcgactgagagagactccgactcaaaacaaacaaacaaacaaacaattcatcagacgatgataagatcttctagtccaagcccataagtaatccatcacataggccacttattccccatcctgtgtccacaactgacattgctaatgggtcatgaggctgagtagcactatagcctacagtccccactcaccacttccgcaggtagccacacccaattagccagtgttgtgcgtgagaaaatctgcttaccttcatgggtaagtgtagtcttattccttcattatacggggaaggaagcttaggctcagagaggtagagggacctgcccaaggccacacagcccaggagtagctcagctgggactgaagaacaggtcccttgcctcaattgctctttcaatgctgccttgcattgaaaagctgagtacccagagtagggagaaacaaagggaggccatccaggattctgaggctacattctggaaaactgtgcttagacacccccacccccaaccctttttgcatcctgagggctccttattacgtctacatgtaaatactgtttgtatggaggaagcactttttaaaaattgcaaaagttgggccaggtgcagtggctcacgcctgcaatcccagcactttgggaggccaaggcaggcagatcacttgaggtcaggagttcgcgaccagcctgtccaacatggtgaaaccccgtctctactaaaaatacaaaaattagccaggtgtggtggcgcttgcctgtaatcccagctactcgggaggctgaggcaggagaatcgcttgaacccaagaagcggaggttgcagtaagccaggtgtggtggctcagggctgtaatcccagcactttgggaagctgaggtgggtggatctcttgagctcaggagttcaagaccagcctggtcaacccctgtctctactgaaactacaaaaaagtagccggttgtggtggtgcacgtctgtggtcccagctactcaggaggctgacatgggaggattgcttgagccccccgtgcaggggtggaggttgcggtgggccaagatccctcctgcactccagtctgggtaacagagtgagaccctgtctcaaattaaaaaaaaagaaaacaaaattttaaaagtcatatgctcattgcaaaaaaaatccaaacaagagaagagtatataaaagaaaacacctttgtccggtctccccagggtaacttctgttaatgatttagatccttctaggccttttcctgccaatttgcaactgtatactgatcacaaatagactaaaagattagctgttcaccagtctgccactgaccccatctctgagaacactacctagcacctagcaggcactcaataaatatttgccaaatggcttttgttcacttataatggcttagatttctttctgtatgaatataggtgggtccacctctgtctttttaaagtcctgttgtacttcatcgcatggtctcataaattaacagtcccttcggtgagcatttagactgcgttacatttttcccgtaacaatcccaaggccttgctctctggctcgcctgcaaggctggcaccaaagtcccttcccatggcttccaaatgccgctgtccatcaaatctccatagtctctggtttcctgggatcaccaacagacaacccgaagcggaggagctggcggcatttgggaccagctcccaggagcagggtcaggttgcagcgggtggatgacaagtccctgagcccgcaaggctccaccacccctacatccagaggctgctgccccagatgatgccccgtggctcacccccagaagcaggggattaaccaggaggcatctcctgggtgctgacagccctggagcctgtggcctggggaaaaggcccatttccaggccttgggtcagctcagcaaccctaagggccttggagagcagaaatgattgtgtgtgcagaaggcaagaaaggtcaaggggagagggtctaaaaggagacccacctacctgtgcacaggcctgcccagaaacccaatgcccatggacacttccaacaggcatctctcacccatggtgtccagtactgaactcctgacccttcctcctcaaaccctcaccccatctcagttcatggcaacaccatccttccatggttcaggcaaaagccttgggaccatctttaactcctctttctctcaatcctatccagtctataagttttgcttcaaaatgtgtcttctcaccacctctgctactacaaggtagtggtgcaaaccaccatcttctcaccagtcataatgtaataaactcactaccaggtctccatgccacctcccctcacctaatacctattttcccaaaacagccttttctcaacacaagagctaaaagaatctcatcaaatgggtcagatcctatctgtcttttttttttttttttttttttagagatagggtctcactgtgttgcccaggctggtcttgaactcctgggctcaagcaatcctcctgccttggcctcttaaagcgctggccttctctgtacatcccatcaagggtacatactgtaggtttgtctgtcactgatgatgttaaatttgatcactttgttaaaaggtagccataggccgggcacagtgactcatgcctataatcccagcaatttgggaagctgaggcaggaggatggctcgggctcagaagtttgagaccagccagggcaacatggagaaaccccgtctctacaaaaaaattagccaggcatggtgatgtgtgcctgtaatcctaggtacttgcaggctggggtgggaggatcacttgagcccaggaggtcgaggctgcagtgagccgtgattgtaccattgcactccagcctgggtgacagagcaagaccctgttaaaaaaaagaaaaagaaaaaaaaggtatccataaaggattccaatttaattaaaaatagaaataataaaaacatggtacatgccatccagagtgtcccctgcaggctgcatgcagctgtccagcctccatgtgtgactccagctctaccccatccacagcaatgggcagccagcagtggcaggaagacctccaggcacaaggtgctcattcctggcctggagcaggggtcactctggagttcctagcacacctgggctgctctgtggattctgccaggcacagatctgtgccaggcaactctcatcagttccctttaagcagggagtgaaagttacacgggagggaggtgtgccagccctaacttctctcctactctgtggcttcagctcgggaagggataggtgagaacaaggataaccctccaaggcaggaagtctatggcaggaagcaaccctgtccccctcgccccacaccccaccctcaaccagggccctcagaaaatgagactcggcattcctcatgagggtgtggagggcagggcctgctccggggaacagctgctgggcacggaattagcaggtcccggaaacaagcaagctcgatgaatcccagaagcctggcctcggacaggggcacgtctgcagagatttggccaatcgggcacatgaatcactgaaaacaaggccgtggacaggaaagactaatacggtccgcttttctgttctgctaagggtctgctgtgctctcctggggtctccatagaatgcccagaagctgccaagacagcagctcagctgactgtcacgctgatgcctggctgtgaactgggacatgagatttccaagatgaggttaaattatgctgattctacattcgaaatggaatcatgtctggcatggattccatctacactggcaggactcaaggcagaactaagcgaatcaaagtcttgtcttatttactgttccaaagtcaaaaactcgtttttgtcctcaaatatcctcccgaagacagtgacagctatggttcaggccatcctgaattaattcaccctttggaatgtgaaggaaatacgggaatatatattttggcatttcctatgtgccaggcatgatgctcagtgcttcattgtcttgtttcattgtctcgaccatattctgagggcgattttaacacatccctaaaggaaaaaaggaaacagaagctcagggaggttacatggtgcacccaggttcatatggttaagaaccggcacagctgggatttgaacccagatctgcctactctaagtctcagttgcttaaatatcacatgtcttcctttagtaatatcagattctctcagggcctctacacttgattttcaataacagtcaaactattttaagttaaaagagattccttttcacctgaaaaacaaaaacaaaaagatccactagaactaagaaattaactgagcaaggtaaaagaattcaaagtcaatatacaaaaatagttgtatttctataaactagcagtgaacaattgaaaaaataaaatgttaaatgccgtttacaatagcacagaaaataaaatatctagggataaaattaacaaaagatgtgtaagacattgaattctctaaaacattgctgcgtgaaattaaagaaaacctaaacaaatagggatatataccatgttcacgggttggaagcctcactgctaataagatgtccattctctcaaactgatctatagatttaatacagtcttcatcaaaatcccagcaggcctttttcagaaatcaagaggctggttttcttttctttgtttgttttgttttgtttttgtttttgagacagggtctcactctgttgcccaggctgaagaagctggttttaaaatggaaatgatccagaataatccaattttgaacaggaagagcaaagttgaagaatttactctgattttatgacaatataaagctacagtaaccaaggcagcatgacattggcataaagatagacaaactgatcaacagaaaagatattctattatgcaaataaataaataaatatggaagttaagttccttcaagcttatctctgcaaggaacatgtatcacaggcccagagaatgtgataccaggtacttactgctcagtcctccagcctggcaaaatcacgtaactcccgtgttcagagtcaattggactaaaattagctgaagtcataagctttgagcagaagaaagaaaactggatccagagcgcagaagcttgggtttttgacccaatcgtcataattaaacataaagtctcaacttttcagcatgtaacaataatagtagtagtagtagtaataaaagcactaacacatgccataccctgttctaagagctttacatggatcagggcctcatttaattctctcaacaaaatagaataaaagagaaaatagcaagcattgcacctaggaagggaaatcttgttccatgacggtttgtttcaattttacattctttttagatgtgtataggtatagaattacaatgtaaaatacatatttttttgcattcactgccagggaaggaataaaacacatatcttatagtgggattgcaattataacagtttacaagccactagggtagtagatgagagggttatgaggtaacccaagtgatacagtgcccataagacttttagccggagtctggtacatagtaaaggcatattaactagtagccaggcacagttattactattgtcaaggccagcttcatgggtgctggaaccatgcagtctcgtaggacccagcactcagaagggccctgcgtctgggttaatgctctgttgtccccatcttaaaattcttaatgattttaaagaaggggtccacattttcattttgcactgggtctcacgaattatgaagcatgtcctagtctgtatcattgtttaccatttattatttaaaatacttatttatattacaaaatgtttaatgatcacttattattatcaaattgcatctctgcttcttattagctggacgaccttgagtgaggtacttgcatgatctccatgtcagtttcctcatatgtaaaacaggagccgtaactacttctccatgaggttgttgtgtgaaggtttaaacaatacaacaggctgggtgcagtggctcacccctgtaatcccagcactttgggaggccaaggcagggggatcacctgaggtcaggagctcaagactagcctggccaaaatggtgaaatcccgtctctactaaaacaaaaagttagctgggcatggtggcacatgcctgtagtcacagctactgaggaggctgaggcaggagaattgcttgaatccaggaggcagaggttacagtgagccaagattgcgccattgtaccccagcctgggtgacaagagcggaattccgtctcaaaaaataaataaataagtaacataacatacctcaagtacctcaagtgctaggaatggtgcctgggacttagtaagcactccaaaaatattaactatctttattattattatatttattttatttttttttgacacagtgtctcattctgttgcatagcctggagtgcagtagcgtgatcatggctcactgcagcctcgacctcccgggctcaagcgatcctcccaccttagcctctcaagtagttgggactataggcatgtgccaccatgtccagctaatttttgtatttttcttttttgtagagatggggtttcaccatgttgcccaggctggtcttgaactcctggctccagcaatctgcccaccttggccttactgttattatttttattagctttatggaaaaaagtcaactttgggcttgattcttccagtgcacattttggggtgggattaataaagtcatcagtggttctggaacttatttgagccagagatgacttggagaatctgagactatgtgagaaaatgcctcccagaaaaacacagatagtcttgcacgtatgttcacatcacgcctgaagtttcagggtatttatgggtctctgaggccaacgcaggggccccaggaccaagaacctcagaaaataacaagcactaaggactctaggaggtccagagtccgcgagtgtctcggtgggaacagccagccagccacgcaacaggcacataactctttcagggctggggcatgtgcggatgctttaagtcagcagctgtttttagctttgctatatatggccaggggaggaatgagggctataggagggggaggggtgccaagcagcttacaacagggtttgggaggccagagctcctgcaccagccccaccttccccttcccatgcgagagctggagagcttatcctcagaccaaagagaaagcctagaggacagggaggggtcggcgagatgggaatgacagggctttgaagaagacgccaagtcaagtcaccttagaacaatgagtgtcaaactttttggaccatgacttgcagtaagaaacacactttacattgcaaaacacacatacatgcagacacttttaaacacacacgaactctcacacattgtgtgtgtgcatatatatgtgtatctcgccaactgaataaatctttcagaaaataatactttatcttattctctgtgaaatactccgatacttttctattctgttctgttctttccttttgaaaaatgcaggtcgtgacccactgaattgacttcaccatccactaatgcgttgtcctctccagtttggaagactgctgtttcctttgtagcatttgactgcaagaaaaggagggcagtgaagaagacttctgaacctttgaggataaaatgcaagtttcagctttatctcctagctggatggcaagttttggacctcccagcttttgcatgctctgtcctctcgtcctggagtctccctccgccctcgtcacctggctcactcctgcacatatgtcggggcttggcttgcagctgacttcaggaagcctccctgaatgcctgcgtctggtcagctgcccactctggctttgttactcccctgtctgtccctgcctagcacccaacacagaacagcaggacaatttcctgttagatttgctgtgaagacagggagcgtttcccttctgcttattcctacgccgcaggtgtagcgcggggctagctgcatcggagtccctaaataaatatttactggatgaattaataataggtaatagtaataagagcaaccaccatttactaagtactcattcatcccaggagaagtcttttgagagattaggataggtccattttatagacaaggaaattaaggtttggtgagtttaaataatgtggcagggccaggagaatgacccagggctgcctgactcccagccgttcctaatcacaggatcttatttgtccacatccccctcagtgatacccacgtcggggcaaagggtgagtgcagatccttaacaaaccctcaggggactgatgacaggttgattaaagagattttccgaagcagtggccacgtctaattttggagagttacacctcgtgtgtggcttgggaaagagaatctgtgaggtttccagggccgctggatgtggggtcatctcatctgggagaagtctggggctctgacaaaccaaggcagcagggcttctggtcacctggcctgaagagctcctgggcacacctgggataaaacccaggacctgcaaagcctgtgtgatccagcccaggccacgatgtctgcacccctcgctcactctggcattcttgctgttcttcaaacccgccaagcccagcactgcctcggggcctttgcaacaggattccctctgcctgagggacctacttcctctacaggctcctccatcctccttctgagacgactccatctaagaacaccttcctcttccgcctctgttagttttttccataacacttgtaacttttggagattacatgtatgtttgttttctagtttatgtttttccactggacagggagctccttgaggaccttgtcttgctcgctgcccccaccctaaaacttgctgtaaagcagttcctggaacagagcaggtgctcagtagtactggttgcatgaatgaatgaatgaatgaataggttttcctcttttagacacattgggagatgggcctatggtttcctatgctcattttgacccagagatttgtgtcctgtgactcacatccagacccaaaacacacacatacacacgcacacataaatacacacacacacagacacgtgcacacacagacacacatgcacacacacatacacacaccttggtttgaagagaagagggatgggaacagacattctacgcatgcctacagtgcaccactgtgcataggtaactgatgctgtataagcactcaaggattatctccatttttagccagagaaactgaggcttgctttctgctgtgtctccagtgcctagcactgtgcctggcataaacatctgctgaactgaattgcactagattcaagaggctcagaaaacagttcaaggtcacccaactagcaagttgtggagccagaatctgtgctcagggctgttcagtccccagccagtgccgggtagcagccataggcacctgcacaaactccagcgacctcgttaacttccaaacacggtctcgagggcaggccctcacccagacacccaccaactggcagctcagatgcaaatctatcctgcatctgaggctgctctcaacatgcccaggggcctcggcttcagcaaaccttgctccctgggctagctgatgccttttcctgccccagctaccctgatcccagccccagtcccacacttcctggccactgtcaaaaagaggagacactagtgacgaatataatgtcctatgaatgccttctgatgccaaatgtcatttgtaaaaattagccagttttgagttatctgtgtcagttcctctttccaatgcagctcattaggaagactccatggaattatcctgcgtcagaaagagtttgagtgatgattcaaaactgcagccagcaaactttcgctggaaagagtcaggtagggcggggtgtgatggttcacacctgtaatcccagcactttgggagtccaaggcaggtggatcacttgaggtcaggagttcaagaccagcctggccaacgtggcaaaatcccatttctaccaaaaaattaaaaaaaaaaaaattagccaggtgaggtggtgggtgcctgtcccagctacttgggaggctgatgtaggagaatcacttgaacctggaaggcagagcttgcagtgagctgagattgtgccactgcactccagcctgggcgacagagtaagaccctgtctcaaaaaacaaacaaacaaaagaagtcagatagtaaatactttgggttttgcaggacaagaagcaaaattgaggatgttacgtaggggctttcaaataatttcacatgtcaaaaagtgttcttcttcttcttcttcttcttctttttttccatcattctcagcttataagctgtgcagaactgacagcaggctagttcggcccacgacctatggtttgctaggccctaatttaaagcaactttttaaactttgatgttataaaaattgcctgatacacttgtgaaagcagtgtttggacacacactcagagattctgatgagaaggtctgggtgggccactgaatttgcatttctaactggtggatcaatggtgctgatgctgcccgtccaccgtccacattttgagcagtactgatattctaaagtgtcccttttcacagatgaggaaactggcttagctaagtgatatgtccatgtacaccctgtggactaggtaatgacatctgctctgccactccacagggctgttttgccacagaaaactcctctctgattctttaacccactgctaccctcatgcttctgagcctttgtcttcactcttctctctgccccatgcccaccctcacaaacgtaactgtcctgtcgagaccaagctcaggcgtcagctccatttaaagtatttcctgacctcctcaaatctaaattctcctttctgcaacagtatctgtacatacttgtgtataatgtgtataactgtttgtctgcatgcctatctttgtttttcgatttttcgttttgtaaaaatggggatcttgctagattgcccaggctggtgttgaactcctggcctcaagtgatcctcccaccacagcttcccaaagtgctgagattacaggcgtgagccacggagtccaagaattgcttgagcccaggagtttgagaccagcctgggccacatagtaagaccccatctctacaaaaaaagaaaaaacaattaattagctaggcttggtggcatgtgccttgtagttccagctactcaggaggccaagatgggaggattgcttgagcccaggagttcaaggttgcagtgagctgtgattgtgccaccgcacttcagcctgagcaacaaagcaagacctatctttaaaaaatttaaaaaaggaaacacaaaaggaatgtaggcccggcacagtgtcccacacctgtaatcccagcaatttgggaggccgagacaggcagattgcttgagctccgaagtttgagaccagtctgggcaatatggaaaagccctgtctctacaaaaaaaaaaataataatacaaaaattagccaggcatggtggtgcacacctgtagtcccaattactagggaagctgaggttggtggaccacttgatcctgggagatcaaggctgcaaagagccgagatcatgccacaacactccagcctgggcaacagaacgagaacttgtcttggaaaaaaaaaaaaagaatccatggatggatcatagatggatggatggatggatggatggatggatggatggaaagatggatgggtggatgggcaggtagatgtatgaatggctggatgggtagatgaatggttgggtggaagcatgaatgcgtgggtgggtagatggatggatgggcaggcaggtgggtggatggatgaatggatggatggacgggtgggtggattggtgtgtggatagatgatgagtggatagttggatgggtggatggatggatgggtgggtggatgaatactcctcatgatctattgcttgaaaataattttcatggcaaagttaagactagaccctaattctgctagagtatattccatggctgtttatgttggggcataccgaacatgctaatggtagtagttatattttattgtgtgttgagtgtgcacttacatggcaggctttgtactaagcactgccactaatcctctcaataacccctttattagctccatctttactacaagaaaatggaagctcagaaaggtagagcagcttgcccaaaaccacacagcaaatcacttcctagcccatctgattctgtgccaattgccggtcgcctttcccaccctccaccagggtttctcaccctccctggctccaccccacctctgcgggcccccagctggcctcacctccatcagcataggtctcggtgccatagccgtcttgcaggccattgttccaggtgccctcatacttggcaccgctgcttgagctctgccggattccgtagcgtcccttgaagccatgtgtccactcgcccttgtagagccagcgccccttggtctctatgcccagcccatgccgtttgccctggctccagtatccctcaaaggtgtttccgctgggccaggtgtagacacctgccacctcaaagccaaagttccaggagccagagtattcgccctggcccttggggcctgtgcacagtccatgcccatgggcctttcccccctcccagcccccgcagtacgcccctccatcatcaaagtcgaagcggcccccactcatctcatcatagcccctgacaacctccccgtcctccagcgtgggtgcagagggcgtgggtgatgcctgcaacactcctccagtgccctcgggggcaggcccccagactcaccactgcaccccaggaggggggaagcaggatgccagcagaggctgaaagagccccggcgccaagtcagcaccgggtcggctagtcagtgccatgcccgggagccccgactccaccagccagagcaaggctgcctgctggaaagaaagcaggaaggaaaggttcaaagtccccacaaagcgtcccaagtctgccttccaagaagtccaagggaaaacggtgtgatctctttaagaagcccagtgaaagggtggggtggaggggtccccagccttttcaaagaggggaaattcccctcggtggcagcccccgccggaggctgaattcccgcagcccgctggcccccttctccaccccagtgggtgtgcggggctgtcggtctccccgccgctgccccgcccccttctccaatcctgccctccttctgggacggaaaggtcagtgttgccctaacaaggccattggatctcagaagctgctcccaaaataacccccagccagcccagccttcttcaaagcgggaaggaggggtatttcaaatcgcgcccgtgccgcagacccgggcagtggctggaggcatgaggaaggaggctgagaactgagtgcaggcagcccagggaacctggtgtcttttcctcccgggaatgagagctcccttccattctcagagtcccctgggtctgcgcgcagggagggcaccggggaatcggggaagggaggggagagggagaccagcagaacacccagtcctggaacactgaaaatcccccagagcgaggaggttggcagatctcagccccatcaccactcacatgccctaaggggacctggggttacagcaccactgccagccccatcaaggaatccagtgacctaaagagaaaggaatggagacagtttcacatgtgcttccgaaagcagaggagggaagtcagaaagagaggggaggctgtggaaacagggtctggaagatacacagaatctcagtccagtgctcactcaccaccctgagctccctccacccctggaagccggggagaacttggtgcaagaagcaaccatctattccctttctctttctcctgaagggcaaagagaagggagaggagcctgccctcctctctgcctgagacacagactgggcgtcccgctagcttcctctccccaccccttgatgcctcggcgccctccctgccccctgccgcagacccagcagaccctgaaggtcaaaggagtccccttcctgtcaacacagggttgtgttgtaatgaggtcctctcagaaattctcaagggtcatgattttttaaaatttccctttctgagctgtcttttgctctagtgtcctaggagcctgtgaggccagacttcagaaagctcttggggcagggccaggagagaagggcctgggtggattcccagccactcaggttcccaccaaactccagtaaaaagaacaaataaatctccatggcaagaagctgtggccagagctaatgattgtaaatcccagctaagcccaaggttaatgggagtatagaggaattctgggaaaggtaagagccaccaagactaggaagatctgtgtgtgtgtgtgtctgtgcgtgtgtgtgaacgtgtgtctgtgagagtgtgagagagtgtgtgtgagtgtatgtgagtgtgtgtggtaagagtgtgtgtgtttgtgtgtgtgtggtaagtgtgtgtttgtgtgagtgtgtgtggtaagagtgtgtgtgtttgtatgtgtgtgtggtaagagtgtgtgtgtttccatgtgtgagtgtgtgtgtgtgagtgtgtgtgtgaagatggggacagaagagaaagagagaactaagcacagaaggtactagagaacattagacaattatctgactttgaacttatctgacatatttccaaaccccatgataacttaggccacgtgaagtcactgcggaagtcttgttcctgtttggggagtgggtaaaaagtgttccctgctttccttccagtgggttacctgttcttaggacttggttccatccttggtcacagccgctgaccttcaagagccccttctatatctgcgtttcaccaccaggtagaggcacccagcctcttgggctcactgtcaccgtctgtttgccaagctgacagggagcacgtagtggataaaaactgtttcctctgggtggttaggtgtgagccctggccaggctgactgacagcctgcttgcacaattcacttctaagaacatctcagggctactcccagggagttctgctttcgccacttctcactaggtctttggagaatcacaaacttctttctagctctgctgtcaagggaagagcatctcaaactggaagctaggggagtttgagctgcagattcaataccgtaatcatatgtttatgccaggcagccattgctacatcttagcagggtgttctacctatgggaatttaaccactgttcatccatagcagctccctagggtagctgtctacccagggttactacacataagaatcacttacagacttaaaaacataaagagatccgagagccccacccgagacctacagaattagattgtcctgggagaagacttgggcagtcgaattcttttaaaagctcctcagatgaatctgattttcatctctggttaaaaacactgtaagtgcttgttatagtggctcacacctgtaatcccagcactttgggaggccaaggctggaggattgcttgagcccaggtgtttgagaccagcctggacaacacagtgagaccccgcctctacaattaaaaatttttttttttaattagccaggtgtggtgatacacatctgtggtcccagctacatgggaagttgaggcaaggaggatcgctgagtcaaggagttggaggctgcaatgagccatatttgtgccactgcactccagcctggcaaccctgtttcaaaaaataaataaatagatagaaaacaacaacaacaacaaaaccaaggtaaaatttcaaattaagatactgtttaataacataaaaattcatgaatccatttattcatgaatccagtagttttggagttagatatgtcttcaaatcccagtcctgcccctcacaagctgtgtgaccttggaccaattgttaatttctctaaactgcaaattattcatctgtaaaagtccctacctcagaggattattggtatcaagaataacagtatctaccttatctaactgggtgaggattacacagttaatactgtaaaaaggctcagaacacattacacatataatcagtgttagctcttatgagagttactcttacatactaaattacttttcaggcttaataaaatagtcctcaaagagggaagagagaacccctcctaaatattaaatatcttgacatcgaagcactccttattctcatgttttaaactgcaaaacgaagttactggtaaagggatactttgactttgtaaaagtttaagtaagattctttgccaaatttggtactggccttacctgcccagagctttctgacaagctaccatttgtcccgccttttaaaccagtgcatttcagggaaagggagacctcttgtggcgttatgtgcattacaacggactttcctcagaaaaaccaagttcttcaaatccagtggaatttactaaacttgaaatattagccgggcatggtggtgcatgcctgtggtcccagctactcagaaggctgaggcaggaggatcgcttaaggctgggagatcgaggctgcagggagccatgatcacaccactgcactccagcctgagtgatggagcaagatcctctctcaaaaaaataaataaataaataaataaataataatttaaaaataaataggccgggcacggtggctcacgcctgtaatcctagcactttgagaggccaaggtaggcggactatctgaggtcaggggttcgagaccagcctggccaacatggcgaaaccctgtctctactaaaaatacaaaaattagacgggtgtggtggcacctgcctgtaatcccagctactgggggcgctgaggcaggagaatcacttgaacccaggaggcagaggttgcagtgagccgagattgtgccactgcactccagcctgggcgagagtgagactccatctcaaaaataaataaataaaaataaaaaataaaataaacttgaaataattataaactggttttaacggtagctagcctattccctctcttcatctcagatctcttcccactccctagttctgttccctggtcactttctccctctatttcctgctcaacttctcaagcttgactgcttctctgggaacctcaaagggagagaactggaaatccggaacaaggagaaggactgcacccagaaatccactggagttcttcttagccatggaaggctcagcagagcgagcctcaccgtccaggaagcctttccaggcaggtgtcctggctgagctagtgcccttcccacatgctgtctcctcccccaaactatgagttgtttaaagcaaggattttcttctttccaaaaaacagtggatagtgctgcagtgaacataggtgtgcatgtatctttataatagaatgatttatattcccaaaggaatataaatatatattccttgggcactgccaagtgcccaagccaccaaacccattcccaaaggaatataaatcagtaatgcgactgctgggtcaaatggtatttctggttctaggtctttgaggaatcgccataatatcttccacaagggttgaagtaacttacattcccaccaaaagtataaaagcatccctatttctccacagccttaccagcatcttttgtttcttgactttttaataattgccattttgaccggtatgaggtggtttctcattctggttttgatttgcatttctctaatgatcagtgaatcaacccaaatgtccatcaatgatagactgggtaaagaaaatgtggtacatatataccatggaatactacgcagccataaaaaggaatgagatcatgtcctttgcaggggcacggatggagctggaagccattattctcagcaaactaacacaggaacagaaaaccaaacacgttctcacttataagtgggagcggaacaatggaaacacatggacacagacaggggaacaatggggcctgtgggtagggtgggggaacaggaagagagagagcaccaggataaatcgctaatgcatatggggcttaacaggcttaatacctaggtgatgggctgacaggtgcagcaaaccaccacggcacgtgcttacctatgtaacaaacctgcatgccctgaacatgtacctcagaacttaaattattaaaaaacctgagcacctgctgtacagtagatattgcagctcacctgtgtctacccagtgcctgcacatagtggctgctcctggtcttcccagcatctagcagctgatgacccccttctgaaatcctttttcaactggcttctagaatctctctcggttctgctcctgccttactggttcctcctcatccccctgagttctgtaccttgggaatgtcccaaaccttcgttctctggcttctttatctacattcatttctgaggaggtctctagtcacatggctttgcataacctccctctaccgatgacttcgaagtctgcatccccaggttgcaccactctcctgatcttcagtcagacatccagccacctactcaacatttctaaatatctcacgagcatctcagatttgacaagaacaaatgaaactctcaatttccacttgcaaatttgtccctccagccgactccaaacttattaaaacctttggagtcaaccttaattcctgtctttctctcacaccttaaatccagtccatcggcaaatccctgaagggatttagattaaaataattccagaacaggctgggcacggtggctcacacctgtaatcccaacactctgggaggcagaggcaggtggatcatgaggtcgggagttcgagaccagcctggccaacatggcgaaaccccatctctactaaaaatacaaaaattagccaggcatggtggcatgcacctgtagtcccagttactcaggaggctgaggcaggagaattgcttgaacagggaggtggagactgcaatgagctgagatcgcgccactgcactccagcctgagcaacagagcgagactctgtctaaaaaaaaaaacaaaaacaaaaacaaaaacaaaaaaaaccttccagaacacatattatctcctgcactgccaagtgcccaagccaccaaacccattgcctgactcactgaagtagcttcctaactgtcctccttgccttcccttagtctgcacatagtagccagtgctctttcaaaaggttaagtctcggctgggcatggtggctcatgcctgtaatcccagcacttttggagggcaaggtgggcagactgcctgaggtcaggagtttgagaccagactggccaaagtggcaaaactctgtccctactaaacatacaaaaaaattagccagacatggtggtgcacacctgtgatcccagctacctgggaggctgagacacaaaaattgcttgaacccgggaggtggaggttgcactgagctgagatcgtgccactgcactccagcctgggtgacagagcaagactctgtctcaaaaaaaaaaaaaagttaagtctggtcatgtctctctcctctgcttccccaaatgactccctatctctcacagtaagagccaaagagccaacacctttaaaatagcctaccaggccctccatgatctggccctactcatctctctctgaccccacctgctcaagttgcattgacatccctgtggttccttctgccaagaatgcccctccctcagatgcccccatggctcactctcttacttccttcaggtctctgctcaaatgtcaccttatcacagcatcttctctgcccaccccaaatagcaaccctatccctggcccaccccttcctatctcctaattctttttctctccatacaacttacatgttcatcacctctctctactgaggacaaggatattgttctgcttactgttccattcccagaatctagtacagtgtccctggtgtgttgtaagcacttgatatttattgaatgaatgaatgaatgaatgaatgaatgaacgttcaatgaaaacttgttaaataaaggcatgtggaaatcaggatgttacttttttggaacatcagagtgagacttaatccctcaatccacaaaccaaatccattttcctagatgtatcagagaaaggagattagtttggtacatcacattcacaaaagaacgtcaaatatcccaatgagggaccctaatgttaaagttgggccaattaggtctgagcagagtaatttttaacttcaagattcatgttttgaggaagattttgctgagatgtagataacttacaacttattcccacaaatctggaatgcctaaactttcatgcaagttggattttgagttactaggtcattggaactttgtgcttttcaatacttacaccctcctaacaccttcatatgaaaagaatacgtatcatcattctctggtgactgctgcactaatatacagcactaagtaaataaccagagcgctggcttgaaaaacaaactaaaagggatttaaaggcttaagaactcgccttaattcaaagaacatgttaagcccatgttaagcccacttaacatgaacttgaatagctcactacttaattacaatagctccactcctctacagcttttattttatttttgagacggagtctcgctctgttgcccaggctggagtgcagtggcgcaatcttggctcactgcaagctccgcctcctgggttcacaccattctcctgcctcagcctctgagcagctgggactacaggcgccagccaccacgcccggctaattttttgtatttttagtagagacggggtttcaccgcgttagccaggatggtctcgatctcctgaccttgtgttccgcccgcctcggcctcccaaagtgctgggattaaaggcgtgagccaccgtgcccggcccagttttaatttttttaaaggtgagccaaaacattagttgtggaggtgaaagcggggtggtacctttacaaccagaagcttaaattttggtcctggaatccctgaggcccttttaggaaatctgaggtcaaaattatttacatggtactaaaacattacaggttgagggtccctaatctgaaatgcttcaaaatccagaactttttgagcactgacatgaggagcaaaggacatgctcattggagcagtttggcttttaggattatggaagctgaactgataagcatgtaatgcaaatctttcaaaatctaaaaaaaatctgagatccgaaacacttctggtcccaagcatttcatataaggaatattcaacctgtagttgcctttttcacattcattctcccaagtgtacaaaagtttgccagagaccacacaatatgcgatatcccagagactgaatgcagaaacatatgagaatctgtcttctaattaagccaaacattaaaaaagatttgcaaaaaggtagaacaatgccactcttctattttttgttttggaaaagctatttttcattcaaaaattttgttagcttgtaatgagtttttaaatatttaaaaaaatcttagttttaatttctaacatggtaaatatttatatccttttggagattataacaaaaccttttgggtcctgaatttgtcagtgtaaaggaagtgcttacaaaaagtttgagaatttctgccttagatatactaaatagtgtaccttctgtcaccattatcaggaaatatctgtcacagcttctagaactgtgataaggtattttgctcccttgctttaaccacagccttcagatgtcactaaatccacaccaaaccaatgaccagcagaggactcccactactacttaagcttagggtttttctagtaaacacccttcccctctcccccaagtacaaatcacctatttgttgaagcccacatcccattatcatgaatcaaccacagccagcgcagttttagtaaatagtataaatgtattttgtaatttaaacaaaagcttctgttaacattattgctaacatggctagacactgtcactaaatttggtggctctgctcaggatggtctgaacacatgcaacattctttttggagccacctgaaaaacaaggattcatcatccagctgaaaccgaagacagattttttttttaccaaactggagggaattttgaaatggctgaccaaatctgtgggatacagaatgtacaaaattctcttttagggttgctggggtgacagggcagctcaaagaggtaaccatctataacatctgaaactgaggtatgagacctgtattacaactgataacaaaaaaaaaaaaaaaaaaccgccatatatttaaaatgctggagatggtgaagacacacactcgtttcaaatattacaccccctccctccaactgaagcagcccattccaagctgcttacttgaaactgcatgtaacatgtcttaggatgaatagcaccagcaggggcttatttagtgatggttaataactctctcaaacaatagagggcaggccagctagtttattcaaattgaatctaaaccttagatctctggcttaacaataacaagagaaacctttatagacacaatatatcttgcattaaatcagagacggtttaaatcagtcttgtaacttctaatattctgggctggcaactacagcatgacaaatgtttagtgcagttacaaaatcacattttactttccttggctagcaaaccttaaacaaatctgaaaaatgcactgttttacaaaggcttttaccatatacccactgctgccagtctcaagtaattatggtttcttcatcccccaggaacatttctaaataagggggatttttctttgatctgctcgccttgaagtgtatgtaagaactcaagagagtaagttgaaagaatgaagattaactgagatgccaagaaaagtttttattgcaagcacagtgagcagaaagagatgtcttctcacacaaagtggccacaaggtctgccattaactaaatctctttgacaagccttcattggtttaaagcatatgaattagcttcttgctatcaggtgtacatcatttctgccatgtgggacattttcttgggaatatacaagtaatactccatgtagcctgacaggtcctcaatggtcacatcatccacgaagactcgagcttgctcagaacaggatcggggagagccagacagagttctggcgtgcagcgactgagagtagtcctcaagtgtggatcttcgttctggagccaagggagggacactctgcaggcctgaaaaggaatacacttccatatcatgccatctcttacactggcattccttgcctatgcatgtgcatggcttgccctggtttagcttggaaactgattgaaagtcagagagatcactggctttgagacttgcttgggggacttgggtagcgtcagaggagtcttccttcttactctctgatgggagccttggaacagaagttctcaaaggctcaacgactgcccctgtgtgattagcatcgagagaagtagagctttctcctgcactgaactctttaggggatgaaattcccagcccactgctgccatcaggtgagtcagtctggcttttgtgcttgagttgactgctggaagaagacgctattgtactgcaatgtataaactttggaggatgaaggacaggagacttagaacgtcgacgacgctgagttctcactgctcctcgtgaagacttccttgtagacctaaagaggaaaaaaaatatacaagaagatgttgggatatggagctgtcctaaacagattctttatgacagtaggaaatttaccttccctcagctttatgagtctaagctcataaatttcctgcaagagatgcaccttcctccattttcatgctgcctaagtctttgtgtctcaacaacttcaacatcatcttattagcaagctatagaacgaggtgagataatggtattttttaactgaatcacctgggccaaacatttgggacagaacacctgccctgttccaactctaagcttgggagcctttgaccagtgggtctgagggaagcacctcaaacatacaactgaaaccgatcctgtgaagcctaaatattgtgccctaaacctgaatatagcagcttcagaaccactgtgaggctaacgttacaaatgaccattatgccattactattaaatagatttctgattcatttctatcattggtaacagccaatcaatcaaaaccaaaaaactaacaatatttacaacccctgaggttttcagatactgggaattactggacacactatgtaagataactatttataaaatatttaaatagccaggcgcggtggctcacgcctgtaatcccagcactttgggaggccgaggcaggtggatcacgaggtcaggagattgagaccatcctggctaaagcggtgaaaccccgtctctactaaaaatacaaaaaattagccgggcgtggtggtgggcgcctgtagtcccagatacttgggaggctgaggcaggagaatggcgtgaatctgggaggcagagcttgcagtgagctgagatcacgccactgtactccagcctgggcaacagagcgagactccgtctcaaaaataaataaataaataaataaaataaaataaaattaaataaagaactgaatgaaaagaaaagatactcaaaactgctaagtgaattagagacaagaaccaaacaagacactaaaaagctaaacagaacacagtaatcccatcttatccatggtttcgctttctacagtttcagttacctgcagtcaaccatggtctgaaaatattaaataaaaaattccagaaataaacaattcataagttttacattgcgccccactgtgagtggcatgacaaaatcttgcaccatcctgctccgtcccacctgggatgtgaatcatcccttcgtccagggtatccacactgtatatgctacctacccattagtcatttagtagccatcttggttattagatcaactaccatggtactgcagtgcttgtgttcaagtaactcttattttacttaacaatggccccacagtataacagtagtgatgctagcagtttgggtataccaagaaaagccacgaagtgcttctgctgtggttagaatgtgtcacccaaaagttcatgtgttgtcaacttggtcccgaatgcatcagtgctgagacctttgggggtgattgggtcacaaaaggactctgccttcaagaatggattaatccatccacagattaatgaattaaagggttattgagggacagggatagttatcacaagaacggctctgttataaaagccggtttggctacttctcacgagcccccttgccacgtgatatccttccccatgttatgatgcagcaatgatacactcactagatgctggtgccatgctcttacacttcccagcctcccgaaatgtaagaaataagtctctttaaaaattacccagtctcaggtattcagttacagcaacagaaaatgaactaagacagctttctttaagtaaaaaggtgaaagttcttgacttaataaggaaaggaaaaaaataaatcgtatactgaggttgctaagatctacggtaagaacgaatctcctatgtgaaaaattgtgaagaaggaaaaacaaatttgtgatagacttgctgttgcacttcaaatgtgaaagttacagccacagtgcatgtaagtccttagttaagatggaaaaggcattaaatgtgtgggtggaagacatgaacaaaaacgtgctctgactgatggcaaatgggtttgatattgtctgcagtttcaggcgtccactggggttcttggaacatatcccctatggataagaggggacttgtacacacagctaaagaaagaatgactgacgggaaaataaatctgaattatttgtaacaggggccagcaaattacagcctgtgggtcagatctggctccctgcctgtttttgtacagcttgtggacactgctccagtgggctagcactgtgagccacagaccaggctaggggatcctcccctgtccctattctccctgcccgccttcctggccagtagacaagctgcaccactgtccagcgcccgcactagctaacatctacatgttgggtctctactgttggcaactgctgatcattgagaggcagaatctcagttcaagactccaaccaatgctgggatctctggaggagaaaagagcatgctgagatctgagcctcactgggacagaaagtagaactgaccctggcactacctgctacccacccattccacaaggttctcctttcaggctagtcactctatcctgcgactgtctcagcaactgaagacagaatgtgtccaccagccaggacggccaaccccaggcaaacagggtagagtaggagttttctctcttatttaagcacttattaatatccttgaatttttgcttcttggcctccaacggctaaaaaatttaccatacggtgctttacaaaaaaagtttgtcaacctctgacctaaaaggcagtacagagacaaggatttggaaaaaatgtaaaagttaagagagatgacagagtaagtctggaatttctgaagaaacgaatacagagaacagaggacaagtgatttttatagacataatgaccaagaaattttctgaattgataagagaatctatgaacacaggaaatacactggagcaggataaaaagaaatccacataagagacactctgtagcaaaactatagaatagcaaagacaacaggaagatcttaaaagcagccagagactagaaagattatttccaaattaataacaattggattgaaggtatgcttttcaataccaatgtaacgaaaccagaagacaatgaactgtacctaatttaagtgctaagagaaaataactgtcaatctagaaatataatgtcaactatatcaactctatctttcaaaaccaaggaagaaataaagacattttcagataaatgaaagcaaagtacagtcttctgtatccacggattctacacttgtggattcaaccagcagcagactgaaaataccccttccaccaagttccaaaaagcaaaccttgaatttgctgtgctctaagcactatgctgagtctgtgtgagtgaagtgctgtgtaagcattgtggtaggtattataagtactctagagatggtttaaagtatacaggagaatgagcataggttgtatgcaaacactataccattctgtctaacagacataagcatcctcagattttggtattgagaggggcgtgtgagtggggaggacctggaattgatcccccatggatacagatgattgttatttaccaataggacctgatggtatttaacatcgggggccctttcaaatgtatttatatggagttatacaatgcagaggtcctatttactaataataaaccttcactaaagaaactactttaggaaaaaagtaagtgattgtatatgggaggtctgaggtgaaagcatggtgaggaaagaagatataagcaaacagaaaaatctaaataaacactgtctgcttaaataataataaaacctagtctgtgagattaagtaacgactaaaatattgggcaactatatcatggaagtcaggagatcagaggaaagggtttctaaggagaagggctaaattaccattaatttttgtctttgttaaaagcatgcatggtaaaatcaaggctaacaactactgaaagaatagaaacaaagtgtgccatttccaaaccactagaggaaaagaacaaacaaaatccttgaaaacaattgtgtttaaacaattggaaaggaaaggaggagaggtaaggtgggaaaaaaatagaaaaaagcaggacaaataaagtaaaatgacagaatcacttctgaagataccaataatcaaataaatgtaaatgcactaaactcagcagttaaaaacaaactgatcacattgaataaaacagaaaaaaataaaacctagtcatatgctatttatatgaaacacagctaaaatacaagaacacagaacgcttgaaagactagtaggctgggtgtggtggctcacacctgtaatcctagcactttgggaagccgaggtgggtggatcacctgaggtcaggggtttgagaccagcttggccaacatgatgaaattctgtctctactaaaaatactaaaattacccgggcatggtggcgggcacctgcgtaaccccaggtacctgggaggccaaggcagaactgcttaaaccggggaggcggagggtgcagtgagctgagattgtgacactgcactccagtctgtgtgacagagcaagaacaagattccatcttaagaaaaaaaaaagaatagaaaaagacacacaagcgaaacactaactagaagaaaactttaagacaaaagccattatgagggattaagaatgtcactacataataaaagtttcaattcaccagaaagaaaacattctaaacctatgctatataaatccaacaaaataacctcaagatacataaagcaaaaacatagaatttaaagggaaaatagacaaatacacttccatggggtagatttcaacatacatctctattatttgtaagtcaagttgaccaaaaaattgaaaaaaaggttccaataacacatttaaaagcctgacttaatggacagagaacccaagaataattagagaagtcccaatcttctcaaacagacatagaatatttgtaaaaattgactatggaccaggccaaaaaaaagtctcagcaaattcagcaaaagaaggaataggtcctcatctaatcattgggtcttaggttctatatcataacctaactcttttctggacactcagaaaggaaaatccaatactattataatattggaataaaaatcatctcaataagaagctcttacccgtgccaactgtctttagatgcacatgtggttttaggtttggtatcatctgttgctgttctgactggtgctctgacacctgtgccttctccaacagacagagatgctacagacctgaagacaagaacaaagtttacagctacaaaaaactgtaaaatgaggagaacatattgttctcactagctcaaatacaacttttatcaatacatttttttttctagtttgggtttctcaaaaattgctcagcttttaatgtaaattttccttcaaaaccaaatctagagtatccctaaaagcccatggctgcaaaatcataagccaaagaatgactggtaagtgtacccagcagcaggatataaatagactttcaggctgtttccctggggcagatcaggccttatggccagagaatgctaatgacactgaccatttatcttatgcgggcaaaccagagtcatggaactaaacttagtttaggagactccatctaacttaacactgaatacattttcaaatattatgcaacttttagaaaaatattctaacttttgcaacaaatgaacttgaaatattactcagagttaaatccttgcggtttaaaattatacagataatatgggttcccagtaaagaacgtgaaaaaatctaaaagcaagaaaaacagaatcatccatacctcacaacccagagactaccaacatcaaacattggtggaaatccttccagacttttttcacacacacacacacacacacacacacacacacacacccctcctactatacatgctatggtgttgacaaaaattctttagaaagcgacattaatctactaaaatgaaaggatgttcaacaaaacataattgaaagtaaaaagtaactgggaataacctaaatatctaatagaaaaaaaatactgtatttctaaattatggcatatctatatggcaaaatgttgggaaattattagaaattaagtgtacaaagaacttttaatgatatgggggaatgcttataaggagaaagcagcatggttaaacacctatacatatattatgatctcaactatgtaaaataagtataggctatcatgaaccagtggtctagatgttaacagtggttacggtaaactgtgatttttacttctgtttttatcctgttttgtttttgtaaatttttctataataagcatgtattatgttacaatcagataaataggatattgttttgtaataaatatatagagatttgtcctaataagacaaataccactaaggaaaacctgttgaacaggatcatgctaaattcctggcaaggcctggttagtttatgagtcaatcctcagatatcccatttgtaaactggcaacaatataaaacaactagaatgtatgatacactactacacaagtcttattctgcttagtcatgctaatgactcaccccttctcttatttcattttctcaaatattctccttcccttcttataattttactcaaggcagaatatatgctacaaatataattttactcaaggcagaatacatgctacaaatatataattttttttcatttcagcttttactttagatacaggtggtacatacacaggattgttcatgggtatactggacccaggtagtgaacacagtaccctataggtaggttttccacccacattccgctcctgccctccccacgccagtagtcagcggtgtctattgttcccatgtccacgtgtgttcaatgtttagcccccacttctaagtgagaacatgcagcatgtggttttacaaatacataatttttgaccatatattttgaaaaatttttaaataatgttccaagtaatttttagggataccaaaatggcttaattttactttttttttttttgagacagggtctcgctctgttgcgcaggccggagtgcagtggcatgatctcagctcactccaacgtccagctcccgggctcaagtgatcctcctacctcagcctacagagcagctgggactacaggcacgcaccaccatgcctagctaattctttgtttttttgcagacgggtttcaccatgttgccgaggctggtctcaaactcctgagctcaagtgatgtgctcaccttggcctcccaaagtgctggaattacaagcatgagccatcatgcccggcctggctttattttacatttcaacttcttaaaacatcaggaaagaagtccgtgtatcaagagttacttatacaaaattacacactaagagatttgtatgtataattgtgggtacacattcctagtattttcctgatataaaaaaattattcctatataagaaatcacaaaggatacactgcagccacaatctggaactctctgcttctctgctttgcttctgtttcccaagacaatttatcaaagtactgatatgaactggcaagttgaccatattagaaaaccatcaggaggaaagatatgtttttgaagtaacatggaagcaaatatgagcacctataacatctactgtgcaaatctatcagcataaatcttctcatttgatagcccaaaaatagtactagcaataggcaggtggctgtaacaacaactaacatctagttttcactttgtgctaggtactgcatgcatttcttcctatcgccttcaaggtaccacataaaggatggttaagagcagaggttctgggccagacgcagtggctctcgcctgtaatcccagcactttgggaggccgaggtgggtggatcaccaggtcaggagatcaagaccatcctggctaacacagtgaaaccccgtctctactaaaaatacaaaaaatcagccaggtgtggttgtggccgcctgtagtcccagctactcgggaggctgaggcaggagaatggcgtgaacccgggaggcggagcttgcagtgagctgagattgcgccactgcactccagcctgggcgacagggccagaatccgtctcaaaaaaaaaaaaaaaaaaaaaaaagagcagaggttctggagacaggctatctaggttcaaatcctggctctgcaacgtcctaccaatgtgacttttagcaagtaatttaatttgtgtgagtctcatctgtaaactgaaatgacagtagtacccatgtcctaaggtgtagtgagaattaaataatgcgcacaaagtacttaacccagtgttgagggcacaggaagtgaataataaactttaatgatgatgattattacttgtgggtgttctactctgagcttccagtgtttagtttccatttatgaaaagaaattcttatatccattaaaaatgttgatttattttggcctgggagaaagaattggtgtgagaagagtcttacacagaacattttgcaaagggtgaaatactaacattcagagagcagctggtatgcaggtgctctaattagtttggccaaagggtccaaggttattgatctcagtgacagaaccctcctgaatagaggtttccatagtgatagactgagcaatcacagaccatgaaatctacaatgtcttcatagatttccactgagccaacccacttttagtgaaaaatactgtgattcccttgagatgtatgataaaatccctagtgggacaccgcttgataatctttgattaaaaagaagtgggggggaagccctcctcaaagtgaacgaaaccaaaacacccaacctgggagggcaaatgaactgctacttttcaaatttaaccaaagggttttctttttaaactaaaacaatactgtgcagaatctggaagaatgtcgcactattagcatttatatcttctttcaataatgagaaatattaaaagaggaagagctttttagggaaaagggactatttaaaataagtaaacaaataattccaaataatatattacatatttaattaccctgatgcatccactcttaattttttgaaagcagtctgtagactctcctcctctccatccttggcttcggatttcattgtgcaagtttttacactacttatcgatgttcctgtttacactaaaaaagaaaataaagtgagcaaagtaaaaacaggtgggatcaaaagtatacctgttaccattactgttagaaaaaaaaagcaaatttttatttcaaaaaggaagtttcagtgtagataactggagactataggttttatttcttaaagggaaacaaatgaaatgataccaaaaatggatatgtactatgacagaatataaactgttcacatacttgatgccaaaatcctattacacaattttggaaactagatgatctaaaatctatgtttcagtatacatactttttaacgggaatctccccagttggtctagaaacctatgaacaaaatgacatcagaaataaaagggaatagctaaaattatagcactctgattctttaaaatgacactgagtatttgtctggcctaaccctagttaagtataactttcatgacacatgatagcatttctctagagcagtcctgacccagacagctatgttcacaggaagacacgttttagagaacaagacgttaccactgtgaaagcagaattagaaatgcactctaccagtaaggttgatacttccatttgtgtttttcttcatagcctggaatagtgtaattaattgttaaacaagaaagaaaataaatgaactatacacttgcaaccccctaaaaacttcattgtgcacatgagtggaaaaagaaaagaaaacaaacaaacttctctttagcctaaagaaaggttgaaagtaaagaaaaaaaacagaaatgactattgtgtagacgcaccactaaatgatctcttaactagtttgattaatcaaagtcctccatattttccacctgatttttatatttaaacagagaaaggtagatgaagaaccaaccaaagcaacaagaaacacaacagagaagtctgttaataaacccttgaatctagtctccaaattattttttcactcagggttattagtaccaaattttgaatacaaattaagcaaaccagcatctatgaacatatcagagagaatcagaagaaaagtaccacaaaaaaaatagaaatagagaatatttgaagcaaaaggttcacttcacctctttatttctaagcctttacccgcccccccccgcccccacccctcttgggcattctcagagggagcagtgcctctccaacggcccttgggtcctctctgattcatatctgctcgtttctcaaggtggctccgaagttattgtgagacctctaatattccaaaggtcaaggtgtcataatgtttgatataaagtaaccattatattattgtagtaccagcgcaaaataaagaggcaaggaatcaggacttttcactttacttatttgcggaagttaaggtattttaggcagagctctctggggaacactgaaaacagtctcaaaagaattcagctactaaaaaaaaaaaaaaaaattcagccagcctgcacctcaacttcttaggacaaaaaaataatttagatacattctcgacgtatattttgctggtttatttaagtacataaacatgaagaaacattatccacacaatcccatgcttcactagtctctaattctcagtttagggtaggatcccccaaatacacaatcaattcctatatacctggggggagaggtgagcaatcacttatttcaatattttcaaagcttcacatcatctaaaagagtactattgcaggttgtaaacaaatccttcctgctggtagaactaaattgaagtttgacttacaatgttcctcaattaccttatgatccgttagtcaatgttcagctcttaccgagttcataaatcatctgagccaatctccccaacccgcagaccgccccccaagtcctctttagccctctctggaaatcagtcagcatttacgtacacatcacatttaagtatacactgctgaaccctacaggcagaaattcatttctttcacaaatatttacagaattcctaccacgtgcatggcactagaatgaatgctagggatagaagcccaaactccatttccgtaaggactagaatctcattcctgccctccaagagcttacaatgtaacactgtgctaagaggctctgaacctacatatgtaacttttaattataccatgctgacttaatagcatggcaggtgatcaccctagatgttaatacaaactttacattcctgttgacacactaaaagatctatcatctaaaaaccaaaacaggccagaattaaaatctggctacagactaaaacttcaggaatgaagttctgtctaaaccattttcagacttccagcatttttttactactcactttttttctcagttattttagccaagagcaaatgagcgttaggcataaccttaagagctagagaagagcatgtttgtaattataaaaggctcattatgctcctctgcatccccagatccccattcaaagaaagggctgtacaactaactccggacaacagatataattggcttgcctttcttcattaatattaaatttgtgggagacagtcttggcgttttcactgcagtgaactcgtgaagttgaacaatctccaaagagatgaaactttaaaaagcctattcgaagttaaagtcaaatcacaccaggcaatttaactttgcctcggattttccacaaccttacaaaaattacaaagttcttctaagttcctccatcaaaaggccaaattcctggttttttctttcaacaaaatggatgcgtcacaatcttatttacatcttgccgttttaaccaagacctccttgaatcccaagcctaggtctacacttccaggcccctgagaagacctaagaacgatcaagaagggatgcgcgggtaagcgttgtcatcacaacattaaagatttcgaaactcccagaccaccagaaagcgtagagtatggggaagaaaaccaaacccagcaactctaagaggcaaactagaccgggaggaaacaatcggcccccaggacaaaaagcacattcacacctctccgtgcaacccactcatccctttatactcgcagcgctgcagccaaagcacaaagttctttcttttcacccagagtctgtgcctgtcgcggttaaacatgaacggaggaaaattcctagtcagaacccagaggggtaggacggggcttggagtgtggggacaacgccaagcagggagctgtccaggggcactgcccgcccggggtctccagctgtgaagttgcgctcctcgggagattcctggggtcagaacgagaggctggagtcggagcgaggcacaagggatgcgggagaagaaaggagtggggccgaagaggtagccaaagagaatggggctccgaggcgagagagaaaggactggaaggggcaaagggcggccaaggagggcgaaaaggggaagctgccgctgggcgggagacggcggaggagcgagacggggcgggggaccgcgggaggacgggaaggcgggaaggggagagagcgtggagctcggagctccagcaggcacaggccgcggcagataagggggcgcggagaggcccaggcccggcccaggcaggaggcgtcgggagacgacgcgacccaaggcgggcgggcccggggaaaaccgcccgcggccagaccggcagtggaagctgagacgcagtgctgcggcccctccccgtcacgtcagggcacttacctcctcgcagctgggacgctccggtgatgcggggcagtcagttcagagcgtctctcccaaatctcggcacccgactgacccggatccaaaccagccaagggggcggcccgcgcctcgggagtcgcgttgcgcctgcgcactccggcatgcacccctccccctgcttatgctcctcccaccccagtgactcggcagcgcggcagccgacgactgcgcagacgcagggcggcggccgcgcctctccaacgccccgcacccgcccccctcagaagcacgtgcgccttacgtaatttcctgttattcttcggtttgcctcctcccagtggcgtggatttgctcccgacccgcttttggggcgtgcctgcttcctcctctctgttaggtgagtgagtaggcgtcattcttcacagtagtcctctgcctccaccgccccgggatctccttgcgctcggtcctctacgtggagtcacctatgcagaggaattccacggggcgggggcgaggacagggtgcgggggtctttatggcagacaatccccggctgagcgcttggccagagtttctgtgatgctagaatctggactgcctgcgacctctccgggactcggacaccagccctcgcctcctggtgatcttttaggtcctgcagagaagtgaagaggtattggacgtggccagggtcaatagtgtgaagccagaattagaattgaattgaaatgccttcggttttgatatctctgctgtttgtcttgaggcaactgcttttcctcctttgggcctctcagttttccatctagtaagtgaggaagttgaaccttatcggtgaatctcgtgttttcaggcgtagactcctttgagaatctggtgagaactgtagatcctcttgccaaagaaatgcacctacacaccaaattttgcaaaaagatttaggcagttcaccaaaggagatgaattttaggattctttacatttttctgattctgaatgttgctcagatggtaggcgggaaaaggtgatctgtgcaacagctgccacccgctccatcaccaggactggttctgctgatctagctgtgcctctcctcgcctgccaatctccagctccacgtctgcactgctcaaagcttcgtgagaacagatgattttgcgcaattgagttggatggcgttgattgtggcccacccctagagtgagggtttttccctgaaccaaaactggccccatccaccgtcattccccaataccttagttgtagtcaactagataggctgccgaagatggtttaactgtgtccagcttaactacagccaggctttggaatgcctggcctatgtctgtaaatgaaatctaacaatttattgtataacgttgttaaacatgaagcatgatgttggccctggataaaacattttaaattctcgtcgttcataccagaggctcagtaactgaccggttgaaagaaaactgttcattgtaacctaatgatgctagttagatagcattagattatgttagagatcagataacttgttctagctgcctttgtcctgtctcacagtgctagtaagtcaggatttaaactgcccttctcaacatctcttggacaagaaaaagcgggaaatatgatgtatttattttctcagaccttgccaagtgaaatgtatcaaaaccaaacatgtctttttaagctgccacttcaaaatataacttaagataaaatctcatatatccttgagaaggcctggcacggtagctcatgcctataatcccagcactttgggaggccgaggcgggtggatcacttgaggtcaggagtttgagaccagcctggccaacatggcgaaaccctttctctactaaaaatatgaaaaattggctgggcatggtggcgcatgcacctataatcccagctacccgggaggctgaggcaggagaatctctgaagccgggaggcggaggttgcagtgagccgagattgcgccactgcactccagcctgggccaacagagcaaaactgtctcaaaaaaaaaaaaaaaatctcatatatccttgaggggaaagaattgtctggatcgtgattgaattcccagggcttagcacacttcctggggattagtagatgctcaatacagttttggtgaattctcattttacctgctttccatccctaattatattaaataccaaaaactaaaaagttacagtatttcattttatgtaagcacatctccatcataaagagttagatgctttccaagaatgtgactcattactcggggagtacttggaaggtgggaacctcttgtgaatgctgaagcctgttaactcacacacctgacgtggcctgaagttttaagtcattatacataggactggctcacggtgtgatacatcatgacttggaaagagatagaaaagctacaaaatgggatggatctgagtgaacaaaaagccagatcggtgtcctataccagcaattccaagtctttttaaccatgggaaaaaaacctgaatttgtgtgtggactttatattgaagaaatcaactttgtattaatgcacatggtaatgccatttaattaaaaagctgtggtagatgtaaaattcctctaacagtgcttctttcttgctacaagtgtcttgtacatgctttagtaagagagacttaattccatgaatttatactgcaagaacaatttatataggaagataatagtttctcttaaaaaataactttggagaagccaagtccaaagtaataaagaaaattatttgcctaaccatgtggctgccatcctaccagttggtaatctggaaaatattctgttcttatgttttaagactcaaattaatttatttcttacctcgatatacttttttaaatgacttagggtaggccaggcgtggtggctcacgcctgtaatcccaacactttgggaggctgaggcaggtggatcacctgaagtcaagagttcgagaccagcctggctaacatggtgaaaccccatctctactgaaaaataaataaataaatatacaaaaattagctgggagtggtgggcacacacctgtaatcctagctacttggaggctgaggcatgagaagcccttgaacccaggaggtggaggttgcagtgagctgagatcatgccacggcactccagcctgggctacagagcaagaccttgtctcaaaaaaaaaaataaaattaaattaaaatgactttgggatagaagatagtgataatgattatttgtcttgatttacaagatgttagctcatgtaatcttcataaccaatttgtgaaatgtacttctatgatgtctgttttacagctgaggaaactaggctcagaatagttagataacttgtccaaggttacatagtttgtaagtggtagaacggggattccaatctaggcagtctgactatagcaccctgctgaccgctgagttacactgctttccttagcctccccaccttcacctcctgtatgtacccagctagaccagggatacctgctttcacctggaaaataccactgggtttgaggaaattggctgcccagggcctaggactgttccagccactctttctttgcatatatttgaacccagcaggcatatttccctctcaggtcttttgtatgtatttcccctcctggagcattgtttactcacagttcatcttgtcattcaaagtctctgctcatatcagctccccaggggggtcttccttggcttccccagcacccccttcactgtgtatccctttaccctgctttatcatagcacttgtcactacctgacaatgtatagttattttttggtcccctcactagaatagaagctacccgaggacagggactttgtgtcttttttttagtcactattttttttaatcaaagatgcacattttcccacaatttattaatagcggttagaaaatctgaatgtgtcttataatcgccagtgtgtcctggtttaattggtagtatttttttctttcttacttgttcctacagtaagtggtgagtctttaaaatgatggtgtcttagaattgatgaaaatacagtgtatccccaaggcctgaactctatgtggcacatagttggctctcaataattacttgttaaaggaaggcattgagtgttgtgtgccagaaactattgaaaccttttttttttttttgagatctcgctctgtcacccaggctggagtgaaatggcacaatcttggctcactgtaacctccgcccccaggttcgactgattctcgtgcctcagcctcctcagtagctgggattacaggtgagcaccaccatgctctgctaatttttgtatttttagtagcaatttatatcattccagcagactcttagaaagtagatggggagggtggggaatgtaagagagaccagttagaagacactcgaaataatctgagggaagaccagaatgggaaccatggctgaaggatggtgagaccagcagggctcggcagcctgctgagcagatgtctggcctgagccgtgccagtaggtggcccccttcactaaggaagggaatccaagaagactaggtttggggagtgtgagacggtttggttttgaacataaaagtttcaagtgcagatgaaaggaggaatcaggtcccaaaggctgcagcaagggacttatcctgaggtttctccttctgagaactgtaggagctatggaaagaaatgaccaaatttattttagaaagatgactggtttcagcgtgagccggcatggtgatccaggcctgagatgatggtgatcgaaggggcaggtggccctaagtatggagaacaagtgagccgattggaaagttgcgtagatcaggccttggggagagattgactacgaacaggatgggcagtgagagaaagctgacaatgatactttgctttccagtttgagcaactgaatggatattggtgcccatctcaattaaactctgttgaacccagctgacagtgagcagaggaagaacatttaaatggagaatcatagtaacagctaatactttcttttatttctttccttttcttttcttttttttgagacagagtcttgctctgttgcccaggctggggtgcagtggtgcaatcttggctcactgcaacctctgcttccctaattcaagtgattctcctgccttagtcacccacgtgtgccaccatgcctggctaatttttgtttgtttgtttgtttgtggagacagcgttttgccatgttggccaggctgctctcggactcctggcctcaagtgatctgcctgcctcagcctcccaaagtgctgggactgcaggcatgagctaccatgcccagcctatgagggctaatactttcatagctcttcctatgcatcagaagactcattttaattctcaccacaattctatgagattaccattatcacactcatcttccagatgaggaaactgaagcaaagagaagttaagtaactcaccaaggtcacacagctaacaagtggcagagctagaatttgaacctaggcagcttggtagagtctgtgctgtcactgcctctctgtgctgatatatctctaaattagttcagtttggacagagtgaacctgagagatccgtggggcagccgcgtggaggtgtctagcaggcatgcagatatatggttctgaagctcacatgggaggtggggactggaaataaagactgtggagtctgcatacaggtggccattgaagccacaggaaaggtcaggacccttaaggagagggtgggagataatcagaggaaagaaacaagggagccctggaaggcaaacacaagcattccagttgtgggaaggacatagtcctttctgcaaatgaatacactgcacctggcttatagatcttcagtcaacagatagtccatcccgcagaatttgtttggctctgggtaccctgacaaaatggagttcctggagccacagccctaaggacctgcctcaatggtggtgatcctccccactttcttctaccatgagagtccactgggggcctgttggcttctctgggcatctgttttttgcccctccctacaactgaagagcctccagctcctctgtctaccacccgtccacttcgtcagctcaggtcccctccctgtctctacgaccacagtaacatttcacctggagcttcttcaggtccctcctgaacttattttcagccctttacccgtacatttcttgtatctcctgctagattctaaatttctggagggcaagaaaaacctattatgttgactttccctccctcaactcctgctcccctgtgtgtgttaaatggcccgaccccgttgtcccatgggacttcgcatgcagtccaccagaataggagctgtacctaccacaggagccagtgagtccatcagtcagtcagtcatctcagcaaataattccagttgtctactggctttctggaaacatgactggggactgttgatgcctttgacagttgattcaagcagcaggacctttcacaacagcctcctgtttttgtggatggggaataggcaagggttgggaagcgggaattcgccgctctttcttgtcattctcttcatagcccccaagctactgtggtctattgttttgatagttgctttcccgaaatgttaacaggatggagagtaaaggaggtaaaggaggactctgatgcctcagccatgcgcctgtgtgccgattcccattaagcctgcaccaatttgatttccaagactccagtcaatcctcagagctccaggaggggaggggcagcttttcctggtagctgctgatcaccagcagagggagccctaggactgcagggcctctttccttaccgttggtgaagcccttcactgtggcttcaaaactgtggaagacccgggatttgtggatcacttgcctttagaatagaatcaagaaataaagctgcagaagaaagaatctccatgtggtaaggattggaagggagtgttgagaggggcttttggggtgctggtaatattgttctttgacccgatgttggttataggagtgtgtgctataatgtggtatatgtacatttttctgtgcgtataactaaacttcagttaaaagtttttaaaacttaaacatctctatgtataccacaaaataggtatcaggttagggtgagcggtttttttccctacaattcttaaccttatctgagtcacaagacagccctccctcccttcctccgagaaagccacagaccactggttaaggacttctcctgcagcagccgaatagagaaagtgagcaaaggacatgagcagacggttcacagcaaaagaaatacaaatagcacttaaacttatgaaaaaatgctcaatctcaatcttcaaagagaagtgcttataaaaagtatgcggagataccatttttaacctgtcagattggcagaaatcccaaagcttgacagcatgccctgtggatggggctggaggtgggggagtcgggagaataaatagcaggacttttaatacattaccagtgggattgtgaaattgacagccctgttgatttgggcaatatctaccaaaattacaagtctaagagtctaccctgtagatgacatttgtacctatatgtaataatttatgtaaaagatgatccattgcaacattggctgcaatagcaaaagatcagaaacaactgaagtgtatgtacaggactggtgcatccacaaagcaaaatactatataactgggaaaaagtttgaggaagctgtgtgtgcgctgaggaaagatctctaagatataggtgaaaaaaagcacgacgtacagctaagaatatatgtttgtattgcttctatcttcataaagaaaaactgataagctagacaagtaactaagaagtgtttcaggaagtggttgggggccagcaggaggggccgggcttctgagtgtataccttgtgttctgatttttgaatcatgtcagtgtataacctgtgcaaaacaaaacaaagtttagagttcctgctctaaagctgctgagctaagcctttaggaattcataaattattatatctgcccaattaaagaataggtgggtttggtttttcagtttgaactgagctgtgtcttggtgagagtcttcagcttactccacatttgaacacagttcaggaaagtgtattgcagtttcctggctcagcctaactctcaagaattctttctttaccctccatatgctcaaaaccaatcttgcccctcaagtgttgacactcagctagctatcatttttcaaagtatttcattttcagcttatgtattcatgagcatctaactctgcctgagggggagaagagaagttttcaccagaaaagtatatctgtgttttcagaaaccaatagatatgaaatcttgctctccatcccttatctttgcctgtctctatagccatcctttctcctttccctcctcctagctaaaaccaatcccagctctcctcccttctcaggaaactcactttcttctgtatatgcaaacacacatcatgtcttctgtcatagtaaaaccaaaaacaaaaaaagcaaaccccaaacccacaaagcccccttctacccaggttccccacagagctcctgtccttttctccctgttggagccttagccagtggctctacttcttcccctctccacccaccccccttctctctctctctgggtcggtctctctctgtctctctctctctctcagtggctgtacttcttcccctctccacccaccccccttctctctctgtgtgtgtgtgtgtgtgtgtgtgtgtgtgtctctgtgtctctgtctcaccaccctttcttcaatctactgcaaccagacttctatctcaccaaaacgttccttgccaaggtcatggataacctccttgttgctgaatacagtggccctagtctcattctcatgttgcttgagttttgagccctgcctgacgctgaacacagccgcctcctccactcgctctcctttcagtccctgtggccactgctcacaggggcaccctctcagcctcaccttttctatctcctctgcaggctcctcttttcttgccggtctgctgaccctcaggggccatgccttggctgtcttctcatctcacattcacttccaggatgatgccgggttggagaatatggaaaacaaatctgacttgctcgagtgaaaaaggaatccactagaagaatgtcagaaagctcactcaacaaaaggaaaagctaaacagctaggccttatcagcctgggagccagaccgagcccttcccaggtgccaggaatctctgagcattgcctcaggcgattcagttccacacatctttgttcctgatacatctctccgtacaagattcaaattcccaggaaagaaactgattggctttcatggcagggtcatatttgacccactcctactcacaggggcaaaaactgtaacttcctttgtattttttctttttcttttctttttttttttttgagatggcgtctcgctctgtcgcccaggctggagtgcagtggcacgatctcggctcactgtaacttccacctcccaggttcaagctatcctcctgcctcagcctcccgagtaaccgggaccgcaggcatgcgccaccattcctggctaatttttgcatttttagcagagacgggtgttttactatgttggccaggctggtctcgaaccctgacctcaagtgatctgcccgcctggacctcccaaagtgctaggattacaggcacgagccaccacacccagccctgtattttcatctaatctcattttcatctcaaacttccattctcccaacttgaggggatatttccttctcttctggtttacagcgctctgttttgcacagatattcagtgttcaggatcctcctctctcctgtgtgctcccatcctcccggcgtggcatctgggtataagggggcagtgggtaagctttatggctcagatgccattccctgcctgttgctggtcttcactcccacgtggtcgctcggaatttgtccccgggcattacggattatggtggaacctaccaaaatggggtgaacctgatttagttcctgagcagtacacggacctgcttagaaaattgcctgtctgtagccatgaggtcctcatgtgccacaaccctcgcagcttgtcacctggcctctctttgtccctcagtccacttagcacatcactgggacatgtggacacatctggattaccacctacatggcacccacaggtcaaggggacaacgggctgctgttaccacagcttcggtgccagcttagtgctgtcacgtggtcagtggggggcatctctccctgggctgtgcttgggaaagtgggatcctactgtcccccaaacctgtccagatgcttcttagtcctacataggagttttccttcgaggagggtagacacttgcacctgaactcttgtcctgctttttttttttccttggcagcaccagaaggcttttgccctgcttgctgtacaggaacttgtctgaaccttatactgtgtcatctccacactatggcctatagaaaatctctatcctctcatccccaggttgtcctcttgctctgtaaagggaatattttgaaagttaggaaaactgtttctgcctcaacgaagtcacattttaacactaatgtccacagactcaagaaatctaatttaaaacagagccaggcaatggctcccattgattcagtggctggagggagctgcaggctaactaggaattaggaattagccacaacagaagtgcatttggtttcatctcaagaaatatcctcctttacacctgtcttggcagatgtgcccactgcttgggtggcaggacactttgattgtctcaccaagactgtgtggaaaggggtggggtacttctccaaagggaaaagtgggctgctgtcacccataaaaggggtagagggaaagggcaggcagaaacagtaaatgtcttccatagcttcaggtcacatctgcctgctgctgataccacattcatatctgcagcccatgtgtctcctcgatgccacacctctgtgtccacagtcttcctattcagtcgcctatgtggatgtccctctgacacctggtgaaacatgatgtgtttctaattgagcaggttatctttccccctaagcctggtctcctggcctttccccagtcccttccagtttaattgaatcaaatcgaatgtgattcatctcctcccatccgtctggctcctgggttatttaatacccccccaaactttggaaatattttaatgtgttaatatattattttttaataaaaaataattttaacaaaagaaaaatatacctttatagaaaatttagaaaatataaagactcaggcaccttatcatttttatctcctggttagccctgggaggcaggtactattatttatccccattttacagatgaggaaactgaggctcagagaggaaaatagcttgctgctttcacacaggtcagaaggatctatgccggatttgagcccaggtctttctgattgcaagctgaaggcggtcttgtctttgggatactcagttgaggggcttggcctttgcctcagaagcattcgacttggcccctgtccttgaggatgtcccctggcagcatttggtaaaggtgttgcggagcgcctaggagccacactgcctctgagaagccctgcctcagatgcccacccctctgtgtggccttgggcacactgcccaagcccctgtgcccagtttactcctctgaaaaatggggatgatgatagtaatcgtaggacttcccttagagggctaggagaggatgaaatgactaatgtggtagaacactgcccggctcatagcatctgatatggcttagatatttgtcccctccaaatctcaggtcaaactgtgacccccagtgttggaggtggggcctgatgggaggtgtttgggtcatgggggtggatccctcaggaatggcatggtgccctcccatggtaatgagttcaccccaggcccatttgttagagcctggtacctcctgcctcctccctcttgcttccctctctggccgtgttatctgtgcaggccggctccgcttcacctcctgccatgagtggaagcagcctgagacactcactagaagccaggcagatgctggtgccatgcagaactgtgacccaagcaaacttcttttctgtatacattacccagtctcagctattcctttatagcatcgcaaaacagactaatatagcatccaacaacattagccactgctactattatcattagtattttaagtgtgtgcattttaattgctggtacactgtgtgaactggcttggatgtttgtcccctccaaatctcatgtcgaactgtaatctccagtgttggaggtggggcctggtgggaggtgtttggatcatgggggcatattcctcatgcttggcttagcgccatcctgtggtgatgagtgagctaatgggagatctgattgtttaaaggtgtgcggcacctcccctctctcttgttcctgctcttgctatgtgacacacaggctcccctttgccttccaccatgactgtaaattccctatggcctcaccagaagcagatgccagcaccccacttcctatacagcttgcagaaccaagaacaaattaaacttgttttctttataaagacagactcaggcatttatttgtatcagtgcacaaacagcctcatacactgggcatacgtgttatatcctgctttccttcaatttactattagcgtttttatgtcacaaactattcctcaaaacattattttaatgactgtataatagtccatcatttaaatatattcataacttattctgtagttaaccatccacccgtttctggacaattaggggtgtgtgtgggtgtttgttgtaataaaaaactctaaaccaaaaatccttgtctgattattttcttagaattttacacctggaactcctgggtgggaaggtataaaccgtttaaagtctccggcaacacactaataaattgcttcaaaggaaagttctcaaccgttactctcagcagtgtgtgtattagggccatcctcaccacaccctttcaggtagcgaggtgagctttttcaaagtccacctttgttgctatttctttacaaggcaggttttactacatgtccttgggttggtgggggttggtcccatgctcaaggtgcttctacctatgctgcctgttacaatgttcttaaattagctaacagtcccataaaccctgagtggacatattcaccctgtttcctgcctggtctgttctcctgcgggtggaaatataattttcagtgctggaaatttttttttttttttttgagacggagtcttgctgtgtcacccaaactggagtgcagtggcaccatctcggctcactgcaatccccgcctccagggttcaagcgagtctcctgcctcagcgccccgagtagctggaattacaagctcacaccaccacgtccagctaatcttttttgtattttttgtagagacagggtttcaccatattggccaggctggtatcaaactcctgacctcaagtgatccacccaccgtggcctctgaaagtgttgggattacaggtgtgagccaccgtgcctagccaattcactggtttctctgtttctctgtcgcccctgctttaagatgtttagcatgtggcctcgctccctggtgacagcacagtcccaaagcccagtaatatattttaaagaagtctattaaaggtacgagcttagctggactgacccattatctgaaatctgtgtgtggccttcccaacttacattgccaatacttgtgcctgtttcaacttgagattcctgttcggtgtactctccctttaagttaccctactgctggtatcctaacctcccagaaagagagctagagttttattttgttaaagtaaaatcagtattccccagtgctctgtattttacaaaatgcattcacacatgactgccttgatcctcagaatgattctgggagttactgtgtttatctccattttgcagatgagccccagagaggcgaagccacttgagctcgtgagtgacagtcagatgtcaagccctgctctttctaaagcgtgctgccttcagaaaagaagagccagaaggatggaaattacttcagaaagatgaataccagctttgaaggaataaaagctgacgaggaattgaaggagttgaggcacgagcttgaacagggttgcatgtttggcccttgattgtaaatgcccattgctgcacctgttcctgttacttggggagttgcagcagaaggaacagcggcctgggactccagagaactgggttccctctcatccctccagggccaccacttcttgtgggcccttgggcaagtcactgtactttctgagtctcagtttccccatttgcagaatggaaataactaccccggtctaccaacttagaagaattgctttgaggatctgataaggtggtgtggatgatgctgccttgggggctttacagtctggagctcaagggaccccttaagttgggcttacttagtaactccaggggtgggcagaacaggactccaatgagggtttttttctttttcccttttttttcttttcctatctcttaacttttatctttattattttacaatgcccttgtaagatgaaacaagtgatgctgaaatatctttttcttttttaacctttattttagaattggggtacatgtgcaggtttgttacataggtacagtgtgggctgctgaggtttgggagtacgaatgaattagtcaccccagtggtgagcatagtgcccgataagtggttttttcaacccttactcccatccctctccattcttgtgttccccagtgtctgctgttcccatttttatgaccatgtgtactcaatgtttagctcccacttagaagtaagaacatgcccagcactttgggaggccgaggtgggtggatcatgaggtcaagagatcgagaccatcttggctaacaaagtgaaaccctgtctctactaaaaacataaaaaattggccgggtgtggtggtgggcacctgtagtcctagctactcgggaggctgagacaggagaatcgcctgaaccggggaggtggaggttgcagtgagctgagattgtaccactgcactccagcctgggtgacagagtgagactccatctcaaaaaaataaaaataaaaaaataaaaagaatgtggtgtatgattttgttttctgtttctatgttaatccacttaggataatggcctccagctacatccacgttgttacaaaagacacgatttcattctcttatatggctgcctaatattccacggtgtatatgtaccatattttctttatcacatccactgttgatccacacctgggttgattccatgtctgtgctattgtgaatagcactgcagtgaacatgtgggtgcgtgtgtctttgtggtagaacgatttcttttcctttgagtataatatatccattaatgggatggggctgacatacttaaagtagaaacgaaaattgtcatgtgctcccccacgcccctccattctactctgcagagagacagctgcctgctgtttgtggtttagtacacctccttccaggctttaaataaactaaacccatgcatatttctctgtgtatactttttcagtacatgtacacgtgcacttgtttgtacagtttgttctttaaattttataaaaatgtcccctatactgcatcttgatttatcctcctcatgattttaagaccttgctacatcagagctacttttctattctagaaagaaagacatggccaggcgcggtggctcacacctgtaatcccagcactttgggaggccgaggcgggtggatcacctgaggtcaggagttcgagaccagcctggccaacatggtgaaatcccgtctctactaaaaatacaaaaattagccgggcatggtggcacgtgcctgtaatcccagctactcaggaggctgaggcaggagaatcacttgaatccgggaggcggaggttgcagtgagccaagatctcaccattgcattccagcctgggcaacaagagtgaaattccgtcttagaaaaaaaaaaaaaaaagacagacacagaaactcttttcaatgtctcttttcaatgtctgggcattttacaggtatgtatatttaatgtattatttaatttgggttattaccaatttttattattttatttatttatttatttatttagagacagagtctcactgtctcccaggctggagtgcagtggtgcgatctcgactcactgcaacttccgcctcctgggttcaagtgattctcctgcctcagcctcccgagtagctgggattacaggcatgcgccaccatacctggctaatttttgtatttttagtagagatgggttttcaacatgttggccaggctggtctcaaacccctgacttcaggtgatccacctgtttcagcctcccaaagtgctgggattacaggtgtgagccaccacacctggcctggttattaccaatgtttaaaatattaccaatggtgctgcattaaaatgcttgtcaaacaagtttgtcctcttgtaaatgtattttgaagtgaagttgctggtaacacagattgtaatatttgatgaacaggcagaattcctggattccactcccaccagtggtgtttggggcacccattggcctacggtagttctcagccagagatgcttcttcctctgaggttctgcccctgaggggacatttggcaatgcctggagatatttttggctgtcacaacttgggggatggtgacggagatgctactgatatctagtggacagaaggcagggatgctgcttgacaccttacaataaacaggagagtcccccacaacaaagagttatgtcaatagttccaaggatgagaaaccctggcctccaccaagattgccagtgggggacagtgtcattctttccaatcttgccaatctggtagtttgcaaaatgataatttattctataccttttcaggataatagagatatctttatttcttcctttatatattacttgaatttgatataatgaacatgtatgatttctataattcttttgaaaggccattaaggattttttatttatttatttatttttgagacggagtatccctctgttgctcatgctggggtgcaatggcgcaatctcggttcactgcaacatctacctcccgggttcaagcaactctcctgcctcagccttctgagtaactgggactacaggcacccaccaccacgaccggctaatttttgtatttttagtagagatggggtttcaccatgttggccaggctggtctcgaactcctgacctcgtgatccacccacctcagcctcccaaagtgctgggattacaggagtgagtcactgcactcggcgccatcaaggggtttttttaaaggtctctacctcttggaccattaactgttgactgatgttgcagtgtgttcctaagacttaattgtgtacgtgcctgtgtgtttttccttgatgaggtatagaaggaagtcctcagtgcgggccttgagaatccatccgtgcttcaggttccagtctcccatcctctggccatcagaattcctctattgctcttccaaaccattttcacctggttgacacccaggcccaggggccatctccaagaatcaccttggcccagagagactcgttaccactgagcagacctccaaaacaaaatgtaccttgcggctgaccctgggaaacccagcacatacaccatggactcatctgcccaggggcacatttcatgcccacgttcatttcccagctttgaaacctgagatctatttgcccagtgaaattccagggctgtcagagctgagccaagccccctggtgctgctgcggagctggagctggagctgctggcataggctctggtggggctcacattccctcctcatctccactatgtcccgtcagagtggaaatggagtggagcccagtctcacccactcccaccccccacccccccacccggcatggcaaggactcctggagcagtaccgcactccttccacttggtgcagagtcagccagagtcagcctggacgaagtgtccacggggaacttgttggtatcacttggatattcccaagaaaatttcccacgtggtagaagtagcgtagacttgcctgcagcccttgtgaatcgtgtggagtgggctcctccaatagccgacgttcagagtgggcagacagctcctggccctggtgccgggcacaggacttctgccagcagttctgtgtgtttgatctgcagcccagtgtggttttccagtaaagcaaaggtgtatgtggaggttgcgtggtctaacgtctccactctctagaatccacaccagtcatgtcaggggcatggagtgtccaagctgtgaggccatgaatgccggagacacctgagcattgctgacgtggagagatggcagtaatcgggaggggaggagaggacataaggagatgggcctgagttctcagcctgccctgctgcccatcctgggcagataaatcactggacctcttgggcctcagcttcctcattaactggttattggaagcattcaccctttttcaatctgaagtttcctcaaaaacactgccaattagagaaagctggctaaaatgaactagagatttaaagtagagtttagagtaagtccagctcctgtctcttattcaaaagtaaccaatgctcagaataggaaggaaaaaaaagaaatacagccaagcaaaaagtagctcctaaagaacacccatgattccacccacccaaaggccgtggcatcctggtggaagccttctagatacgtggttcttttccttttgttttattgaaatgtagtctcactctgtcacctaggctggagtgctgtggtgaaatctgggctcactacaaccgccgcctctcctgttcaagcaattctcctgcctcagcctcctgggtagctgggattacaggagcccccgaccatatccggctaattttttgtatttttagtagaaatggagtgtcaccatgttggccaggttggtctcgaactcctgacctcaagtgatctgccggcctcggcctcccaaggtgctggaattacaggcgtgagtcacaacacttggtcaatatgtgattcttaacccggattagtagcctgcttttggggaagggagcccctgaattcactaaagttgtgtgtttgggttcaagtttctacctctcattcaattcacagagaggttcttgactcattgaaacaagaaccagtgttttaagtattttctttgcatacatatcaaaaatacctttaatgagatctgaccacacaggctattttgcaatttgctgttgtcccttactaatatactgagcttaatttaacaaaccgtcttttgtgggccctttaggatattctagttgtgttgctgttacaacgagtgcagtgcacatataagttgggtgaagaagaattagagcataaagagaaatcaaggaaaaaaaaaccataaaatttgaacagctgacaaaagtgctcaaaagggcacgaaaggatgtcaaattatcctacagtgataaaaattatcaataagaaacacgcaaggggccgggtgcagtggctcatgcctgtaatcccagcacttcgggaggctgaggtgggcggatcacctgaagtcaggagttcgagaccagcctggccaacacggtgaaaccctgtctctattaaaaatataaaaatgtggcaggtgtggcggacgcctgtaatcccagctactggggaggctatggcaggagagttgcttgaacctaggaggcaaaggttacagtgagccgagatcccggcattgcactccagcctgggtgacaagagagaaactctgtctcaaaaaaaaaaaaaaaaaacacaaggggccgggagtggtggctcacgcctgtaatcccagcactttgggaggctgaggcaggcagatcacttgaggtcaggagttcgagaccagcctggccaacatggtgaaaccctgtctctactaaaaatacaaaaagtcaggtatggtggcatgcacctgtagtcccagctacttgggaggttgaggcgggagaatcacttgaacccaggaggcagaggttgcagtcaactgagatcacgccgctgcactccagcccgggcaacagaatgagactgtctcaaaataaaaacaaacaagggactaatattttcaaccaattatattgaagtcaacaaatatttattgggcagatgctatgaatattatctgccggaccctctgccaggtgctgcagactcaacaggtagccgccactgaccttactgagcttacaaactagcagagaccaacatggaagttatttcacactcagacagtttgtgtttaaccaaactgccttcatgccccatgaccttggccacagctctctcattatggaaactgtcaggaggtctgggcataggcgcggtttgatgaatcaacgttggcagggagagacacagaggaatcctgaatcatctcgctccccatgctcttctcgcgccatgacccggcctccctgcctttggggaggctgcatgttccagccctgagtggaggccccctccaagctcacacccaacccacaggttctccctgaaagaaggtcattcaacccctgcatgttcttttcagaaacaggatgttcactgccctctgcctcagccccttcctgcttgtttgaaccttttccttatattgaactgcaacagcgctccctataacttcctctgattggtcccagaacctcacagaacaagtctgtcattttctccaacctgcagatctaaagacctttagatcttccttgggtgaagcatgcaatcccatagtctgctccttgagtggatgccgagggtctgtgatgcccttccctggcaggaagggcctgcaaacccctgctgattcaccaaactgcacatgcccagaccttctgacagggtattcatgagcagatggccacagcagggggcagcaagggccagacacttgggggccagctatgctgatgacactgaaaaaactttcgcagcttcaagagctgggtggggaaggacgagaagatgggccagccctgattggaggacctaatcggctgtcctcccaaaaggagcctgtgtgccttacagcagagcttctcacaattaaagtgcatgccaatctcctggaagtctgctaaactgtgggcttagggtagggcctgagactctgcatttcttacaagctcccagtgctgtgctgatgctttagactatgctttgagtagcaagaccctggggcagaggggaggatcacagtcctctatgagagctttaaaaatagggaaagcggctgggcacggtgggtcatgcctataatcccagcactttgggaggctgaggcgggcaaatgacctgaggtcaggagttcaagactagcctggccaacacggtgaaaccctatctctactaaaaatacaaaaattagctgggcgtggtggtgggtgcctgtagtcccatctacatgggagcctgagagaggagaatcgcttgaacccaggaggcagaggttgcagagaaccaagatcatgccactgcactccagcctggcgacacagcaagactctgtctcaaaaataagtaaataggctgggcgcctaattatttatttatatttatatattttttatatttatattttttaaataaatttatttttataaatttattttataaataaataggctgtgcacctatttatttttatttatatatattttttatttatattttatttatatttatatttatatttattatttatttattttattacaggctctcgcctgtagtcccaacactttgggaagccaaggcgggtggatcacttgaggtcaggagtttgagaccaacctggctaacatggtgaaaccctgtctctactaaaaatacaaaaattaactggttgttgtggcaggcataagcccagctactcgggaaggctgaggcaggagaatcacttaaacccgagaggcagaggttgcagtgagctaagatcatgccactgcactccagtcttggcaacagagtgagactccatcttaaaaataaataataaataaataaataaataaataaatgtggattcccaggccataccataaaccaattaaatcagaatctctagggctggattcctggcattgctactttataaaaggccttagttagttctaatgtgcacacagggtaaaaaatcagtgattgacacccctccactccccgccaccttctctttcactgcttcagcttgaaatctctactgggtgagactgatgaccagcccagtttggtttggagcagaagcagtggttttcaggatcacctgggagctttataaaatgtccatgtcagggctcctgccccagaccaactgaatcagaattgctaggtgtcagggccaagagattcttgtttcacaaagctacccagatggtgctaaggttcagccaccagtgtagagcctaatataagaaccatctaggattaccacattcttccgctgaacattcagattcaaagtctggggtgaggaccaggaacctgtatgtttaacaagtgccataggtgattctcatgagatgcaaggttgagaaacacagatggaggaaagatccctggattggagtcagtaagacagggctcctggctgtgtgacttctcacaggtcacttaccctctctgagattcatgtcttcatctgtaaaatagagatgatgataataactgcgtgaggcagagatggatctctgcccccagagacctgtgttctcagtccataggacgcagtaggtgttggaaagaggctgccactcaccagggactgcatttcccagctccactttgcattgaggtggggcgaccacatgactgagttgtggccaatgaatgtgggcagaagtgaggaatgctgctgcccataaaacccccatgatccgccactctctctgcccatctgcccattggatatcaatgcctggggtagcttcaaagccccaagggaaagttgatagaactctttgttcctccccacaccgctgccaactggactttatatgagtgaaaaataaacgtccatgtgtttagctactgtgacttgtatctgttaaagtaatgagtgctatgttaccaaacatactgcctctgggagtgtggcaaaaattaaatgctctaatgcagaggttgcaaacagacaaggtgtgggcttggatccaccctgtagatatgttctgttatgcctgccccagtgttcttttttatataaatttatcaataaatttttatttttattttttatgagatggagtcttgctctgttgcccaggctggagtgcagtggcgccatcttggctcactgcaacctctgcctcccaggttaaagcgattctcctgcctcagcctcccaagtagctgggattacagccgcacagcaccatgcccagctaattttgtattaagagatggggcttcgtcatattggccaggcttgtctcgaactcctgacctcaggtgatccacctgccttggtctcccaaagtgctgggattacaggcgggagccactgcacccagtcgaatttattaatacatttttaaatgagcaaattcacacaaacctctggatttccaggttcgtgaaaacccagaatcgctggcacctgggtttgcattccagtggctggacgaggagcggctgtcctgttgagcggaacttgtgctccccagtttgccacagtctccaccacacagcattgctttatgcctggcttgcctcacattcatgacacttctcccatatgcctacagcttctcgagtcagtgaaccctgatgcaatagatgtagaagttacgcgttagctgttaagatttttcacagcaaaattcaagtgacttcttgctctcaggaaagccattcttgcccagaatttggaagcaaaatcttctgggtactccttacgggctgaaagatgttccccaccccgaccctacccatatctgtggccatttcagcatccgctacatggaggcagaggtaagagatgggacaagctcaactggatttgggggtcagatagacctgggtcccaacgccagctatgcttgcttcctagctggggatttggggccaggcatttcttgttttctttctttctctctctctttttttcttgctcacttttctctctctctttctttcttgctcacttttctctctctctctctatctctcgctctttcttttttttgagatgcagtttctctcttgtcacccaggctggagtgcgatggcacaatctcagctcactgcaacctctgcctcccaggttcaagcaattcttctgcctcagcctcccaagtagctgggattacaggcacccacaaccatgcccagctaatttttgtatttttagtagagacggggtttcaccatgttggtcaggctggcctcgacctcctgacctccggtgattcgcccgcctcggcctcccaaagtgctgggattacaggtgtgagccacagccctggtcagcatttactgttttctgagttgctgtttccatctgtcaaatgtggacattaatgccctttccatgagattttggtaacaggtctagctcagaaggacactcagacgatgtgaattcccttcccttttcctgcagtgtgaggaccaggattggcttgccctcagtggtcacggggaaatcaagcaatatctttttttttttcctaaacaactttgatttaaaaaattaaaaaaatatatggaataatgcatgtctacaataggtatattagtcagcttgggctgccataacaaaatatcacaccccaggtggcttacacatcagaaactaaatgaaagaagtagaccaaaaaaaaaaaaaaatcagaaactcattttctcatagttgtggaagctgcaagtccaagatcaaggtgccagcagggttggtttctgttgaggcctcccttgctgacttgcagacggcaaccgtctcactgtgtcctcacagggcctttcttctgtgagcactcctgtgtctcttcctcttagaagaacaagagtcttgttgaattagggctttgcccttatgacctaatctaacctttattgtgtcctcaaaggccctattttcatatataaccacattagggattacttcatcatatcaattttcggatgcacaattaagtccataacagaaggaaaatcagaaactccaattaagaaaaataaacaacaggccaggtgcagtggctcatgcctgtaatcccagcactttgggaggccaaggagggtgggtcatttgaggtcaggagttcaagaccagcctggccaacatggtgaaactctgtctctactaaaaatacaaaaattagccaggtgtggtgacacgtgcttgtaatcccagctacttgggagactgaggcaggagaattgcttgaacccaggaggtggaggttgcagtgagccgagattgtgccactgtactccaggctgggtgacagaataagactccattcaaaaaaaaaaaaagaaagaaaaataaacaacaacaaaaaagcccactcatgatctcttcttacccttgtctccaatctcaatataaccacatgactactattagacttttattgactgcccttctacaatttatatgtcttaaaaaattgaattgtacatacttttttggtaacccttttttttcctctttacattttaaagattgtaataacctaagctaaatagaatttttaaaacaccttacataatcaatacctgttcttaaaatttaaacgtatcatgaaatccttccttatatttagtggatataaattattccatggccaggcatgatgactcacacctataatctcaacaatttgggacacctagatgggcagattgcttgagctcaggagttcaagaccagcctgggcaacatgatgaaaccccatctctatgaaaagtacaaaagttagctgggcatggtggcacaagactgttgtcccagctactcaggaggctgaagtgggaggatcacctgagctcgtggaggtcgaggctgtagtgagccatgattgcatcactgcactccagcctgggcaacagagtgagaccctgtctcaatcaatcaattcatccaaccatgttatagatatactctaatttttaaatcaaatcccctattgtctggacacttcaaagtccattttctatggacttagtgttcattagctcttgactttaggctactaatattcatatccagatgagtgtcagtttcccgatgtatattataaggatgataacaatatctatctcaattacaataacgtctataaagtgcttagcacactgtctgacacatggaaaccctcatgactgttattatgattattataaatctgtagaaccttgtatacctagccaatggtttctatatgataaattcgtaaaaggtaagtatatttgacagatttttgttaaatttcaccaaattttcttcctgagaggctaggcaaatccacaatctgttatctggaatgaatttttgaatttggcttttgtgagattttagaaaggtaatgtagtactatactatatattatgtgaaattcccagtgggggctggggcagcacctcataatcaaatacattaatgtttctttagagagagataaataaagatcatagtctcatatcagttcagtgcagatgttgtcactaaatgagtttgtctttttttttttttttttttttttttgagacggagtctcgctctgtcgcccaggctggagtgcagtggcgcgatctcggctcactgcaagctccgcctcccgggttcacgccattctcctgcctcagcctcccgcgcagctgggactacaggcgcccgccaccacgcccggctaatttttttgtgttttttagtagatacggggtttcactgtgttagccaggatggtctcgatctcctgacctcgtgatccgcccgccttggcctcccaaagtgctgggattacaggcgtgagccaccacgcccggccatgagcttgtcttaaacttgtaacttgtagttgggatagagagagaaaacttttgattttataacgttggactttaaaattgcagtcagggaattattgactttcataattggcaagtttagtaggctggagcggtagggttacttaagatagcaactcagttatttcatccagaggccatttgcttccacctcagtaccctgtcacttggtgtccgcttcattcaagtctggttcccctcaagaatggctgccgggaacagtggaggctacaggcttcctggctgatgtctagcagccacatcccatggcccggcgcagtggctcatgcctgtaatcccagcactttgggaggccaaggtgggcagatcacctgaggtcaggagttcaaaaccagcctggccaacatggtgtaacaccgtctctactaaaaatacaaaagttagccaggtgtggtggtgcatgcctgtaatcccagacacttggagactgaggcaggagaaacacttgaacccaggaggcggaggttgcagtgagtcaagatcacacctctgcactctaacctgggcaacagagtgagactctgtctcaaaaaaaaaaaaaaaaaaaaaaaaaaagagcagacacatcccacaagcactgcacaaaaacctgagctttgcattaacaggaccaccagcgaaatgctctgggctgactggctcacgtattagaaacaatcactggaacaagggaggatgggatcaacctgattggctttgaccactgggacaggagtcaaggtaagctccaccccactcccttggcagcaaggcagcaacatgatggggtggggtgaggggaggtagatgtatgtagaatagatgttggacagataaccacagtgtccactgcagattttagtatgaattgcttgtttctaattttcattactacttattgatttgtaggagctctttatatatgatgaatattatgccttgatatggtttggctgtgtccccacccaactctcttcttgaattgtagctcccataatccctacatgttgtgggaggaacctggtgggaggtcattgaatcatgggggcgggttttcatgtgctgttctcatgataatgaataaggctcatgagatctgatggttttataaagggcagttcccctgcacacactctcttgcctgctgccaagagagtacatgtaagacatgtccttgctcctccttcaccttccactgtgattgtgaggcctcctcagccattaaacctctttttctttgtaaattatccagtctcaggtatttcttcatagcagtatggaaatggactaatacatatttttatgtaaattgtgaatatttctcccagtctattgcttatcctttaactttattttataatttttgtggtacaaaattttttaagctttgtgtatcaaatctgtcagcccttcccctactcttttagtccaagcaggatttgaagtgttttggggcggaagggaaaatgatggggagcagcagtgcccttcaagaccttggaaataatgtcacctctcggaattaaaatgacacccagtgaatgcaattagtgttctggaaaagagaattgagagactgtgtaaaagtgtggaacggagactttagggtcacagcaaacttccgtcaggctgagcagaggtcatcaccaggcgcaggccagggggcattcattgattgacttgtttatttaatactggacacctactctgtgtcaggctctgggccgggagctgaaggcagaggtgaacattaccaagtccttactcttatggagcttatatccctatcagagagataaataataactgcatggcaggccaggtgtggtggctcacatttgtaattccagcactttgtgaggctgaggcaggtggatcccttgaggtcaggagtttgcgaccagcctgaccaacatggggaaaccccatctttactgaaaatacaaaattagccaggggaggtggcgcacacctgtaatcccagctatttgggaggctgaggcaggagaatcgtttgatcctgggaggcggaggttgcagtgagccgatatcaagccattgcgctccagcctgggtgacaagagtgaagctccatctcaaaacaaacaaacaaaaaaacaaacaaaaaaaccctgcatgcagaccccctgttggtaagtgctatggagaaaaacaaagtcatataaaggagtgctgggtcagagtagctacctcttttacatgggcagtcaggaaaggtttagctaatcctaaggtggcattcacatgagcagagatatgaaggtggtgagggagagagcttggggaaaaaaaaaagaagaagagcatggcaggcagtgggaacagcaagtgaagagaccctcagcaaagttcggggcggcaccctctgcctctagggaagagtcaggaggccaatgggctggggcagcaggcaagggagggcagaaagagatggggaggtgtgatggggaccagacggggccagatcaggaccagacggggccagatcgggcagcacctttaagtcattaggacttcagctttcctctgtgtgagataagacaccactggaggattgactgtgagtcactaaacacccctgagatctttgtattaaaccctgcctggagaaagacaggagacagagacagtcagtaaaaaaacttggaaaggcggccccagagagccagaagtcagccatgtgtcctagccatgttcagggaggagagacactggctgggaaatcccagaatgggccaactgaaccatccatccccacatcaaggtgataacagtatccaccttattgagataatgacagtgtggtgcttagcgaggtattgagcacatggaacatcctcctggctgttttatgtcatgataacatatgatcatatgtgtaatcagacatttttagtatacagtctgccagtatagctctgggtgagatgttcctcaggcaccccatctcattgtgccctgggttcacattcaatggcaaccacttggtggctgagtccattacttacagaaggaggggaggagtagtcccaccctgtgaggaatacatacttcaggccttttcggatttctgacacccaaactggacaataatttcaccacttaaaactctctagggggccgggcatggtggctgacacctgtaatcccagcactttgggaggccgagacaggtggatcacctgaggtcaggagttcaagaccagcctggccaacatggtgaaaccccatctctactaaaaatacaaaattagccaggcatggtggagcatgcctgtaatcccagctattcgtaggttgaggcaggagcattgcttgaacccaggaggtggaggttgcagtgaaccgagatggcaccattgcactccagcctgggcgacagagcgagactccatctcaaaaacaaaacaaaaacaaaacaaaaaacaaaacaaaacaaaacactcttcagggactccccagtgccctcggcacaatgtgatgactcctgcaggtggcctaagtggcctgacagtaccattcagcctcatgtctccactttgcccccagcagatgagtgggcatcagccggtcaagcactctactcttgtcccacctctgggcctgtgtctctacctggagcatgcatcctttccaccttcttctccccagctggctatgtccccctcatcccacaagcctctgcttcaagtccctgagcagatgctgatgatgactgcctgtatgccccactcttcccactcaatgcacatcagctgacccctagctggcaacacccatgtttattgcccgagggctttctgtgccactgggacccactctgccaactgcagggcaggcctgaagtgccagggaattaaaacttctctcaagaagcagccctcaaacaaagactgacaggacctggtgtataaataccccagctctctccctccttgggcagggtaatgctgaggaacttcatgcggctctcagaattttcctttggaattaagccctggtcacccacagtagtaacttgattggcaatacaccttctttggctgtctttcctgtcttccccacttgcctcccaggatgtcctttttctccaaagttaatgatgtgcccttgaatacttgtctcagggtctgcttggcaggaacccatactgaaagccattgcctctgaaaagccttccctggcatcaccagtgcttagacgggggatccagatgtccccttctggctctaccacacccctttcccatcccagtcacagcacgtatcacacagtcctatcactgtccaggtccctatggaaacacagatgattcactaggaaagaagttaaattggcttttatttgtttgtttgttttgagacagggtcttactccagttgtccaagctggagtgcagtagcgcgatctcagctcactgcaatcctcccatctcagcctcccgagtagctgggactacaggtgcatgacacaacacccggctaatattttgtatttttactagaaacggggttttgccatgtttcccaggctggtcttgaactcctggactcaaagaatccacccacctcggcctccagaagtgctgggattacaggtgtgagccaccacacccagcctggtttttaaacagttaaaggaatggtgaacttcactcataattaatgaaattcacataaagaatgccagctgacaaatgcaaacaaaaggacaaaattagaaaatcaccattttctaacgatagtaactgattcagtcaaagaccatcaatgaatgaggaactggacacccacaaggtgctggtcagaagaggagaaatgaatatttacctagagaggagtggtcaccacctgaaccccatgatcaagcttggcattattagtagtaggacagttagacaccaggtaaggtgaaatggagcatatagcaccactcgtgaaatataattactttctcatccccagaatgttccacctaaatctaatccatccattggatctaaatactagttttggggaaatataggagagagtacaggaagttaaaggacaccacagtgaagcaacgtgacagatcccagagaggaacattgtccaaaacaactggcccagtctcttcatgagtcaatgccattgggagtcaaaaaaaaaaaaaaaaagagtgaggaccatattagattaaaatagacttaagactgcaggaacaaaatccattacatggtccttgattggatcctggttgaaactacctgtaaagacatttctggcaaaactggagaaatttgaatataaatatattttttgagacagggtctcactctgttgcccaggctggagtgcagtggtatgatctcagctcactacaacgtccatctcccaggctcaaacgattccccccgcctcaacctcctgagtagctgggactacaggcacatgctaccacgcctggctaatttttgtattttttgtagagatggggcttcaccatgtcacccagggtggcctcaaactcttggactcaagtgatacacctgcctcggcctcccaatgtgctgggattacaggcatgagccaccatgcctggccttcatattgctaatttcttaatatgaaaattgtattttatgtaagaaaatgacctatgttagatacaaattatgttgatactttataaatatctactactgatgtatttagttggagaaatatcatgatgcctgtaatttatttcaaaatacttcactccccaattaaacacatatggcaagattttcacaatacttatatctaggtgatagatatatggatgttcattgagttactttcatatgtttgaaattgttttgtaataagaagaaaaaaataaaagcaaactaaagacataccattttctacccatagattcacaaagaaaaagttttaaaataggctgcgttggcaagggtgtagggaaatgggcactttggtacaacctctttgaagtgatgtttggcaaagccatgcccttccatccagcaattccgcttctaggaatttagcatacagagtatatagaaatatgggcaaatatatataaataaggatattcactgcagctttatctttattataaaagatgagaaacaacatatatgtccatcaatagaagttgttaagtaaattttttgtggtctattcatgtagtacagagtcctacaaagtatagggtagacgtgttgtgctgataggaaactctttccaagatgtcttgctaagtgaacaagccgaagagcaggccagtgtctgtctgtctgtcttattgctgtatctctggtgcctagcaacgcacctggcacacagtgggtccacaattaatattagttgagggaacgaacacacatctgagcatgactgctgtgagtcaggctccctaaatgccaccagtttcaagtcactgataggggccagattttccaccgccatcaaatttccatccaacaggatgggcactcctggtccaactgctggcatgcaaacccgggtgccagctattctgggttttcttgaacctggaaatccagatatttgtgtgaaattgctcattttaaaatttgtcaataaaataacactgggtcaggcataacagaacatatctgcagggtgggtccaagccaacacattgtcagtttgcaacttctgcattagcgcatttaatttttgccacactcccggaggcagtatgttcagtaacatagcacttgctgctataacagatacaaacctcagtggcttcacacaatagaagtttatttttcactcatataaagtccagctggcagcaggtgtggggaggaacaaggagttttatcaaccttcccttggggctttcaagttcctccaggcattgatattcaataggcggatgggaagagagagtgaagaatcatggggattttatgggcagcagcattcctcacttctgcccacattcattggccacaagtcagtcatgttgtcacctcacctcaatgcaaagtggagcagtccctggtgagtggcagccactttccagcaactactgtgtcctatggactgagaacacagatctctgggtgacagtgatccatctctgcctcatgcagttatcattatctctatttcacagatgatgagccgaatctcagggagggtaagtgacctgtgagaagtcacacagccaggagccctatcttactgcctccaatccagggatctttcctctagctcagtgtttcccagctgtgttagaccattctcacattgtgataaagaaatacccgagactgggtaatttataaagaaaagaggtttaactgggtaatttataaagaaaagaggtttaattggctcgtggttctgcaggctgtacaggaagcatggcactggcacctgcttggcttctggtgaggcctcagaaagcttccaatcacggtggaaggcaaaggggaagctggcatatcacatggtgagaaaggaagcaagacagagtaggggaagatgtgccacatacttatttatttatttatttatttttgctttcttaatctgttcctgaccacatacttttaaacaaccagatctcacaagaactcactgactattgcaaggacagcaccaagccaagaggggtccacccccatgatccaatcacctcctaccaggccccacctccagcactggggactacatttcaacatgaaatttggtggagacacagatgcaaacagtatcaccaaccttgcatctcatgagaatcacctatggcacttgttaaacctaccagattgtgaccctgggagcatacaggattgaattttccttcaagacataccatgcccttttttgcaaaattgaacagtgaacaacatcaaaaatttcacaagagtgacaaaaaaagtatgctgaaccagggaggctaatgtagcaactgagacttgatagaaaatgtagctacaggctttgtggcagccaaggcaaaaagggaaacccagggaccacagagcatctgttatctggtagaaggaggttcaccggttccttatgagccaggcttacagcctgggggatgaggtacccaggagtccttagcagcatgatggatgggggtgggcggtcgggggtgagagggaggactgagcttatcttcctagtacatctatttgcatctgttgtcccagggtctgcttctgtatttcctcaatggtaaataaattaaaacacagtatttatagtaacggaagtataggtgtattaaggaactttgctgaagttcttatgtatgtttagggcagactttgtgacagcaaaggcattatgggctttctttgggctcatctggttgtgccttggtagaagatgcaaccttgaacaaatgacttgacatttctgagcctcgccttcctcatccgtgaaaaatgattattgtgcagatgaaatgagatgatgcatgtaaggggctcaggttgataaatggttgctgtgccattgtttatattcttaccatattatcatgaccttatggctaggagcacagactctggagccagactgcctgtgttcacatcagctccaccacctaccagctcgatgaccttgggcaaggtcacttagcctctctgtgcctcagtttccttctctgtaaaatgaagctaataggactattgtgagagctaaatgggctgatagttgtaaagctcttagaacagtgcctgggcatacagtaagtgctatgtaagtgtctgttaaataaatcatagtctgttccctctgcccttcgaggcccttcaggggaaaagttagaagataacagcttcaaagcgagacaagtaatttccagacactaatttctaaaggaatagctctctagaatcccagttaagaagtatttgccccttagaagactgagaggcaggaaagcgttgatgagggtggaatctttggcaggtgcctggcccaatacactgagctgtttggggggcacgacccacttcctcgggctccttccacccttgcagggagcctgacactgagggctggcggcttttctggcgcgggccagggggaggaggagaaaggagctcccgggatcccctcgccccctcccccaactgcccggtgagtaatgacattcacggagcggggagggagggaggagaggggcaggctcggcgaggccatgtgatgctgggcgagagagagccgccgcgccggagcctccttctttcctgcctctgattccgggctgtcatggcgacccccaacaatctgacccccaccaactgcagctggtggcccatctccgcgctggagagcgatgcggccaagccagcggaggcccccgacgctcccgaggcggccagccccgcccattggcccagggagagcctggttctgtaccactggacccagtccttcagctcgcagaaggtagagccgggccgggagccgcctgcgccggtggccaggaagcttggggaggggagccccagggcttgagggatctgagggcggcgaaagactggaggggggaacctggggtttgggggtcccggaggtcgggggacgcaagggttccttccaggactgctcacctgggaagcgacaggccctgtctgggccccaggagcacagttctcaattttaggagcatccattctgcctctttccctcccagaaacagccggtctgttggggtgcggggcgggttgggggggctgagaaaagagacaaaggcgaggggaagggaatgggcactgctgggaaggcggcttggtggggtgggaggtgctgctgctgcggggagggagaagaagcgctacttggggtccagcctcggtagccccctctcagtcgctccctgcacgctgccgtcccggacactgcaggcccccaggtcacagctcctctgcccctctgtctgcgggccgccttctggctagggcttggagggtctgtccccagtcgtcgcccaccccccactccgtgtcttgagctgagaaggaaggagttaaaccatcccctcacaccagctcggctcagcccatcaggtctgttttgctcttaaaggcacagagtggccccagcccctaaaatgcttctaggacctaggggacctgaggggcagttggaaatccaactggattctcagggttcccgcttcctgggggtaaggctgtgaactgcacccctcagacaggggcgcctctaggggcgcaatctcccaccctgggcggttgtcccgtctctgggccacggattcagcaccatggccagggcccagaggcaggtcctgcaggggcctaagcggcaccactgcctgaccttctgactcctcttcttcctggaagatccttttgttccattcgttcattttccagatggaaaaacagaatccatgaagagaaagggccttggaactcaaagacttagatttgagtcttggtccaggctcatttcatcatctggaaagcgggatagtgatacaacaatagccacttccaatcccaaccccttctcagggttgctgatatggttgttgaagaagggatataacttaggaacttagtgttatagactgggactactcaaacttgagcgtgcattagagtccctggatgatcctggttaaaacccagactgctggattctaccccaaggatcctgattcagtgggtctggaatggggtccaagatgctgcctttccaacaagcgaccaggtgatgctgatgaagctggtccaccaatcatattgcccactgactcactgtggagctgtggacaggtccctttgcctgtccaaagcctcagctttataatctgtaaaatggggtgaatgcagtaacttcctcagagggctattatgagagtgaaatgtgatatgatgcacaaaagtactgatgatggcagtgcctggcgagaggtcaagactctgttgataatgagtgttatgatttttttttttttttgagacagagtcttgctctgttgcccaggctggagggcagtggcatgattttggctcactgcaacttccgcctcctgggttcaagtgattctcctgtctcagcctcctgagtagctgggactacaggcatatgccaccacacccggctaatttttttatatttttggtagagacagggtttcaccatgtttgccagacttgtctcaaactcctgatctcaagtgatccactcactttggcctcccaaagtgctagtattacaggtgtgagccaccaggagcggccgttatgatgttattaaggcactaggtaaaggaggggccagagttaatcaaggtcatactggagtcatccacaaattctgcacatgcttgcacgtgccaggcctcattcaaggagcctggggatgggggctttggagatgaatcagactgcccttcagagtctagaacttcctccccgctagaacctcaggaagtgggccccagcggctgggaccagacagggggcagggaggtggcatctcccacaaccatatcatgagggagcctcctgttctttgcctcatgaaatatttcctatgtagcgtgagctcagggctgaggtggcccctgagtcaggatgagaccatctgctgcagccccacttttgaccaagtctctggccaagctaacctgggcatccttctgtctcccataccagggccttccccctacccaggggcccatggtggattctagaagcagtgtagcttggcagaaagggcatgggctctgcagtcatatagtcctgggttctattctcgtcttggctacttactggctgagtgaccttggacaagtcactttacctctctgtgcctcaatgtccctatctggaaaagaggattttacatcctaccctgcagaattcctttagaagacataggcatatgttaacttcctggcatgtagtaggagcttagcagatgagttttcttccttctctccaatcctgaagggccttaattatataaagagggcagtcccccattgtcaagcatctaaatagcctgtctttaatggcacatgaaatatgaatggaaaaaaatagtccacctctaggagtgatggtggctccattgggcatttggagatcattccagacccagagggcaacaggacagtgtgtgggtccaggcccaggctctatgaccagactgcctgggcttccatctcagctctaccactgaccagctgggtaatcccgtgcaagctgcttaacctctcatgccccagttatatccacacctgtaaattgagaatattaatggtgcctccccaacagggtcgttgtaaggattcagcaaatgtatccatgtcaatcacctagaatagcacgtggcacatagaaagtgctcagttaagtgctgggtgctgttataaaggcatggattttggaatcagccagacatgcggtcaaaccccaactctgccattcccagctatgtgactttgtacaagtgtcttctttgcctgtctaagtcagctttctcatatatttgggggagagggttgaggagattgagtgatatcatgcatgttcacacacttagcacaatgccttaaacaattgcctgttaagagtgagctttcaagcactatcataggtcattgcttggggccacagggtttgaaggaggctctaaatgcctaaggtcaatgttaggatgcttctgaggctgttcctgcccccagcctcctcctcctttgtggggaagaatgaggccaggaggggcaaaaaagcatagagtcaggagaccaaggttctagtgctgccagtcccactaactggctgtgtgacctgaccctctctggtcctcagttttctcagcagggaaatgaaccagatgtttgatacaacgtgcctccctcctccttcaccaggcaggaagaactgccctacctctcggtgcccgttgactttggggcatccatctgtcctcacaactgccccttttcaaaaaccaagactgctacttcctagctgtgtgactgggcaagttacttacaatctctgtgcctgcttccttttcttaaaagtgagggtactgggaggtactagtaccaatttcattggaattcatagggattaagatctaatgcatgtaaagctctacaatagtgcctggcacagaggaggtgataataagagttggctgttgttactgctgttatttccaccagagtgagtctctgagggtcgtctctggctccctgcagcaagcctggttcatggttcccttactgcctcctctcagggtctgccctgtcttggatgtacctctggagggcccctggcccagccttcagatcccaggggcaagagacccaagtctggggcctgccagaggccagttcagacacccaggcatggcaggagagaagcaagggggtgaaggatgagttctctttcccaccctgcccttgcctttcaaactcttagggctgaccctccaacttgtccatgctgcacttgaccgtgtaccgcctcccttcacctaagaggagccccagagaggaaagctgatgggggcagcaacgagatgcatctccctgcttctctgctcagaagcctgcagtggctccccaggtccctcaggaaaactccagagtcctctcaatggcctcaggccctcctgcagggtcctaaccttgcttgagtcaagacctaagttgggggaagcttatgggcccttctcagaataatgtttttaattgaataaaataaaatgtataggatttttagattagaacgaaaaccaatcgtattgaagtacggcgttatataataatatttatgtttctttattaaccccttatataacacggtctggtggccggtctcataacaactgtcatgttggagtcgtgatgagtgcgcatgatattttgagacaactgcaacaactgtgaagtgatgaaaatatctgattcctagtggtgacaatattgcaggcactgctaaacgctaccctactttatcgcctacattcataattgaagaaaatgctaactgtcagtttgagattactgaaaataaacatgtaattttcccatcctagttcaaggagcccctgaattaattcatggaccccttggcctgggagtgtggattaaaagatcctgtgcacaacccggccaggcgtggtggctcacacctgtaatcccagcactgtgggaggccaaggtgggtggatcacctgaggtcaggagtttgagaccagtctggccaacaggtgaaaccctgtctctcctaaaaatacaggctgggcgtggtggctcgcgcctgtaatcccagcactttgggaggccaaggcaggcggatcacctgaagttaggaggttgagaccagcctgaccaacatggtgaaatcccgtctctactaaaaatacaaaaattagctgggcgtggtggtgtgcacctgtgatcccagctactcgggaggctgagacaagagaatcgcttgaacctgggaggcggaggttgcagtcagccgagattgcaccactgcactccagcttgggtaacaagagcgaaactcaagctcaaaacaaacaaacaaacaaacaaaaaacaaaagttagctaggcatggtggtgcatgcctgtagtcccagctacttgggaggctgaggcaggaaaatcgattgaatccaggagatggaggttgcggtgagctgagattgcaccattgaactccagcctggacaactgagtgagaccctgtctcaaaaaaaaaaaaaaaaaatcctatgcacaaccctttctgctcctaccctcctcgtctattcctgactgctctgctccagacacactggcttccttgctatcttttgagtatgtccaacatgcttagagccttagcactggctgttccctctgactgaagctctcttccccaggtccctgtgtggaccacttcctcacttctttcaagcctttgctcaagggccaccttctcgagaggcctgccctaatagaccaccttaattaaaattgctacctttatccctgacaccatggtaccccgattccccttccctgctctattttctctttttttggacgcactcaccgtcttttgacagaccaaattgcttaccatctgcctgcccccacggacatgtcagttccctgagggcagggatcattgttttgttcactgctaagtttccaacaagacctggcacatagtaggcactcaataaacaagtggtgaaaagtgatggatttgcaagctgtaaggtgttatgttaaaaagccatttgattctgtaaatctaaaactgctctaaaaataaggcctactaatttttttaaaaaaagaatttgaaataaactgaggtcagagatgctaagtgttttatacaaagtcacaccgcaactaaatgactaggcagagacaacaacccagcccatcacataaacaagggcctgggtgaggagaggcagtgcctgacccatgacaatgcggcactgtgggtgattttcaggcaccaacagggaagttcgtttacctagagatggttgatgtctgatcacactaagtggtgaccacctaggtctggtccagcctccagggggcagagatggcagatggccttggtagctgaatgcccttcccttaggcttggcttcctctctgggtccccttcctccacagggtgacacatggctctggcctgtagctcagctaaaggtgaaagtctccttggccgcctgccagggtgaccccaaagcagctccaagcaggattatcatgcctctaaagatatagtcccctccccaaatagcagccctgatactttcatgggagacccagggtagagcatgggagcggcccctggaggcaggtgccctgccaagatggaaggccaactgtctggccctaccaagggcaaaggcctggtttggactctgtttccacccattcagaggtcccagcttggcctggaggatggagggccaggtaaagacaagagaagggggctttctgctccagccaaactccagtctccactactctgggcttctccagggcacaggccgcccatgagctcaaatatacacatgcatacctgctcccacgcatgcacactcacactgaccgggaacacacatggcacacactcacatgtacacacatgtgcactctcacatccacactcacacagtccttgaatactcacacttactcatacactcttccatgcacacccacactcacacacacgcagacacgcaaacacatttgctcactcatacacacgcactcacactcagacccaaacagatgctgcccccaggctgctcactctctgcaacagtttttccccctctctcagacagaacgagaagctccctcccactgccgaggagggaagcagagccagccctgtctcctgcctcctgcaaggttgtgaatgtagtagtgtcagcttgcagcagggctgcggggcactctgtgaacactgaatccagcccccttgttttgctgatgagaaaaaggaggctcagaaaggggcagtgatagctctaaggtcacacagcattgctatggcagatccaagatgaggacttgagtccctgcctcctagcccagggtctctacctgcaccatgcgccccacctataggacctgctcttggctaatggagcaaataagtctgtgaatgaatgttgggtgtttcagggcaagttacccttcccttcccatgatccaccaaacaggaggaggtgtttatgttcactgtgagggtggggcatgaagtactctaggacacaccagggtgtgtgtgtggtgtgtgtgtgtaataagtgatgctagaactcatgtattaaccttctgtgctggggctgtctccacaacagcccatttcaacctcacacttgcattcctcacttcacggaagctagaaatcagagagagcaagtgacttgttcaaggtcacacagcaaataagcagtagagctaggcttccaagtcaaagtctgtctgcctccaaaacctgccctcataccagcagctaagacacattacccctactgtgttccaggcaccattccacagggactaaggaatttcatcctcacagcgggcctccgaggcaattactataggactcccactggataagaggggaaactgaggcacaaagaagtaaagctgcccaggcatggtggctcacacctataatctcagcactttgggaggtcaagacaggtggatcgcttgaggtcaggagttcaagaccagcctagccaatatggtgaaaccccatctctactaaaaatacaaaaattagccaagtgtggtggcatgctcctgtaatcccagctactcgggaggctgaggtaggagaatcgcttgaacccaggaggcggaggttgcagtgagccgagatcgcaccactgcactccagcctgagcaacagagcgagactctgtctcaaaaaaaaaaaaaaaaaaaaaaaaaaaaaagtaaagctacttgtaaagccaagtcatccagcaaataagtgtaaagctgggatttgaaacaacaccgttcaggttctgcccatgacgctgcattgcctcttctggatgcttaacttgtcccaggagccaccatctcagctgtgggtggagacattgatgctcaaggggaatgggcctttcctcttttggggataccctccctctcccctggaccagagtggaaggtggggagggaagcataagaatggggccacttgccatcttgccaggggatcttggacaagcccatccttccttctgagtctcagtccacaggcagggggcaataggactaggtgatctctaaccatcttctaacttagaaatattgggctgggtcaggagcatgccccagcctcaaggctctctggcagcttctaccagctcaaatgtgtgtctgggagcccttagaaacataaagaaagactcaggaaggggcaggcccagaactccctggaaggagccctcagggcagagagcactggtttgggagtcaagaaccttgcttccagttttaagtctgctgctgaattgctgtgtgactttgggtagattacttgccatctctgggctttagttttctcatcaagaaaaatggggagatactgttctaccctcctctaggggctgttgtgagtttccaaccaggcaaccagatgaggtgtttgggggaaataaagggctcgactaatgttggcaagttacttttcccctcacttagtaccccaaataatttgagaaatttagctgttgattatgataataataagagtttctgaccaggcacggtggctaacatctgtaatcccagcagtttgggaggctgaggtggccagagcacctgaggtcaggagttgaagaccagcctgaccaacatggcaaaaccctgtctctactaaaaatacaaaaattagctgggtgtagtggtgacagcctgtagtcgggaggctgaggcaggagaatcgcttgagtccaggaggcagaggttgcagagagctgagattgcgccactgcactccagcctgggcaatagagcaagactctgtcttaaaaaaaaggggaaaaaaaaaagtttctgtgaatttcctggccagatctactcctaggggccaggctgagtgctcaactgtgataacgacgatcacaaattgagtgccaataatttgtcccagacactgggttggtactgttaatactatcatttttaaaataagaaaactgaggcccagaaagtttaaggactgcccacactcacacagccaggaatcctatcccagatgtgtccagctgtcaaatccagccccttagccaccaggcagcactgccctttgtcccccaagcagaactgcgctcctccctccaccaggcacatgcccctgggagatatccccccaaacccaggtgcccaagaatgggctgaaagcaatcgtgtcccctcctgtgtgtgacctctgacctccctccccgcacacccccgccccacctgggcagagtgtcccctgtgtccgcccgccttccccgctctgaccctggcgcctgcaggtgcggctggtgatcgccgagaagggcctggtgtgcgaggagcgggacgtgagcctgccacagagcgagcacaaggagccctggttcatgcggctcaacctgggcgaggaggtgcccgtcatcatccaccgcgacaacatcatcagtgactatgaccagatcattgactatgtggagcgcaccttcacaggaggtacggctgcctccccacccaggggcccactccataccacagatcctcaggggtccccacaggctcagacggggtcccagaactttgggaagtctgggaaattcactggagccatgggcaaggcccagtctccccaaaaaggagccacagagccacaggcagggttcagatgcccccagagccccagagccacaggcatagctactgatccatacagagacctcccctcccctggtactgtaagggcatgacccagacacccccccaccaggagcagtggggctatagccctttcccccgagctctagagtcacaggcatggccccttcagcatgagtggccccagaccaccctctaggtccccacagacagggtccagatctcccaggggttacagggcaaggacagggcccagctccctctggaacatagattccctaggaccccataggaacctgaagacatgttcccagacgccccagaaccctgagacaggggaaggcccagacaccccagaaccctgagacaggggagggcccagataccccagaaccccatggacaggggagagcccagacaccccaaaaccccgcaggcagaggagggcccaggtaccccagaacctcgcagagaccccgtcctctcccctcgtaggccctcctcaggctcaggaacttactgcccattgcataggctcagacacccactgggagggcatcagggcccagacatgcactgttttaaaagaatgtgagttggttgccaacatttaaaagtcaaggggacccaagcattgagcacccaggttgcagcttctcttgaatcccgcaacactgggtctaggaccccgcctggcagcaagtctggagctgagaggagctaaccctcggggacagcttggcagagcccagtgaggagagatggccgggccaccactagaatcccctgtccgccagcagccaagcccgagcatgggggtgcccagggcctctgggcagagacatcttggggctcagggatgccgggggcaggtggccggggcaggtgcccctctggcttccctgcccagcccctggcggtgcccacagagcacgtggtggccctgatgcccgaggtgggcagcctgcagcacgcacgggtgctgcagtaccgggagctgctggacgcactgcccatggatgcctacacgcatggctgcatcctgcatcccgagctcaccaccgactccatgatccccaagtacgccacggccgagatccgcagtgagtgccagggcggcgagacagcccctctgctttccccctttgcgccgctcctttcttccaaaggatgtcctccctctcctgggcctctctctgtcctccccttcctcctccttctctccctcttgcattctccatttgtccccgcctctctctgagtgctcggggttggtttctcactctgctggtctctctctctctctcttgctctttctctctgttcctcttgcttgccatccccttcacccccgacttcccggccttccatctcattcacccagtttctaacagaatatgtctctctccctctctgccagtctcgctcccatccccctcccctgtcccctactcttgtcctgccccccccatacacagactatggggctgtctgtccccacaaggtttgttctccccgcacgagtttcagccttagacagtcagggctgtgcttcgtggccaagggctctgagtgacctcagggttaggattaccaaggaagactacccagatgtggcaaggcccccagtgaggtctcagattgaaggttacccatgagcatgtcctgtcctaatggccagcctggacatgctcacagcctacttcatccttttgtatctgacacccagtgaatgggtgttggattaaatcagataatccctcagcagctgtttacagactacgatccaggctttgaacaaacaccatggggtcctacagccaaaagacacctgaagattcttagtagataataggtgctcagtgaatggtcatgtcgtccccctcaaaggaatgtggctaatgttcaaaggcagggttggggcggtgttaggttgtagaactcaaccctgtcccttgagaaccattgtcattgaacaagactcagaatttttttttttttttttttgtgagacagggtctccctctgtcatccaggctggagtgtagtggcgcaatcttgactcactgcaacctcctctgcccagtctcaagcgattctcccacctcagcctcccaagtagctgggaccccaggcacatgctgccatgccttgctaattttttgtatttttggtagagatgaggttttgccatattgcccaggctggtcttgaactcctgacctcaggtgatctgcctgcctcagcctctcaaagcgctgggattataggcatgagccaccatatgtggccaagactcaggatttacctgtacatccggctcccagcaacagccccctcaacaacatttatgaggccctgggcaggggactggggacaaacaggaatagacacagcttctgccatcccagggtcaagttccatggaaggaaagacaagtcaccagccaattacagtgcagaactaagtgagtttgaatgcgctctcaggagggcggcctggtactctatgtcaaacatgagaaagcccacatcttggagattaccctgcagttacacttgaacatatgcaccaagaagtatgaacaaaggtattcactgcagcacagttggcaagagcaagaatatcgctggaaattacccagctgtcatgaattgggaactgggtaaataagttatgggtacttccatacaacggaatactgtgcagatgtttttaaaaattaataggtgtatggaatgcttcctaagatatattagtgagtagaaaaaagtgaagggcaaaaaaaaaaaaacaacatctagtgtgctctcattagtactcagaatgaggttaaatggacacacaggtgcttgcactgcaaggagtatttctggaaggatacacagaagctgccaatagtttgtgtctttggggagcagaactaagagactgcagctgcagaggacagagatttacttttatagtacattcttcaatcttgtttgaatttcaacaatatacatgtatatcctgctcaaaaataaattcgtttaaaaacgtttaatctggtgcccatgagtgttatgagcaggagatcagggaggttctgggcatacacgatgtccaccccagcctccggggccacagaagccttccaaaatgcagcagcgaccgaggatgtgtagcaggtagaaggggagaaagagggagaattatttcacattctggagtaggacagggtgtattgtttttggggaatggaggaagctcagtgtggtgcaagtgtagcccaaggtggggtggaaatggtcgtggtgtgtgtctggggaggagggtctggcagaatttggattttgtccaaagagcagtggagaaacggtgatgggaagtgacgtggtcagatctgcattttacgaagatctctcctctgagggaagaatgaacggggtaggccctggctgttggtaggcagggtcctggccaagggctggaggcagtccccaagggcttctgggaattaggggcactctccctcaatcttgccctgagccatttgaaggtgcctagaaggcactgggagtccagagcagacccagcccaccccctctctccccatctttctctgaggaggcagagaggatctcagggctccagcccagctgggggatgagaggagggaggtcccagagtgcagaaggagtagaagccagcctgcagcgaccccttaatcagtctcaagtcttctcttggggtggcctgccctcctggagtctgaagccaccacatgggcagcgctgggtgacacgcaagaaagatgctgtccttgaccttcacattcataaaacatcaatgagacttaatatagccctgaagctgaatgatctgggagtgcgtttactgggatttgtgtcaggacaggagatggggcagtaggtggtgaaatctcagatgacagaagctaaacaacctaagtcactcactcatttcattcattcattcattcaacactcactgagctcctgctctgtgccaggcctgtgttgagttttaagggaacaaagatgaatctgacatagccactgctctccagaagctcaagtgttagagggagacatacacattcagtgataactacgttagcaccaaaatctccatgtacagcaagcaggcaggttgtggactcaagcccaggagggctcttttcatatagacagcaaggttaatggagttgtgaatggcagctctgattagcgtgtttgcgttccctggcagaagtctgtagggcgtaaactggggaacaaagacattgagcgggcagacctcctacaggatcaggaagggcttcctggaggaggaaatctttagctgaatctagaaggaagctttcaggaaaggaggataaggctattttaggaagaagtagtagtatgagcagaagcctggaggtgtggagtggtctggcacattcagggaacagcaagcatgtacagtggctgaaatgtacatattgggacaggaacagttgggaaaactcagtgaaagatggagtaggtgagagggagggcaagtggatcctgaaggctctttgaaggcaagttgaggagctaggatgttatccgagggcagtgaggagccagggatgggttttaaacagagtggcatggtcaagtgtgtgaagaagatatctctggtaggggtggggagaagggcctgtaagggagagaggggaggtgacagagggtgggtgaaaccatctaggtgagacattaatggggtctgaactaagagagagtcagttaaatggaggaggttaaatgtgaaaaaatatgagaaagatggaggaggaagaatcaacaggacctgggaatgacttgatgtggggtgaggtagtgggaggagctgagggcaaatccaggaatctggctgggctttgtgttggggaggggatgctgcaatttgggaagaatgcagggggagaagcagtgaggcagggaagatgaccaggtctagggttgggtctatcggtttctggcatctactactcgtcctcaagggtacagtctcctcctccgtgaggtctctcagccccttgtgccccaggcaggcagcccctgggtccctatgccttgtgttcactcttccctacagtttactcatgctgtaccatagagtttatttttattttttttaactgtgtattttataatattgctgatgtgtattatttatttatttttgtatttttttagagtaagggtctcactctgttgcccaggctggagtgcagtggtgctatcatagctcactgcagcctcgacctcccaggctcaagcgatccccctgcctcaacctcctgagtagctgggactatggtgtgcaccactacacctggctaactttttttttttaagatgggttcttgctatttgcccaagctggtcttgaactcctgggctcaagtgatcctctcacctcagcctcccaaagtgttaggattacaggggtgagccattggctgagatttctttatgtgcctatctctcccaccagcctgagctcagggcaggatggcatctcatccatcactacggcacagcctgcagtgctccctaagtgttggctgtcgacagtattactcttctgaccagtgtttggatggggcctacttcaagttgtgtaaggcaggtgatgggggagcaaccaaggtatcagagggatgggacctttcctattatctccccaggacatttagccaatgccaccacggacctcatgaaactggaccatgaagaggagccccagctctccgagccctacctttctaaacaaaagaagctcatggtgagtacctcccggcctgctgagtccccttccctacgagctcttccacggaaatgaacaataggagaaactaagtagaagatcagctgatgatatgaaatggaaaagcccctggcttgcttttccaatcctgtcccctgccatttactagctgttagacctggggtaagccactgctgccctcgggcctcagtttcctcatgtgttaggttgtgtctttaaaagcagagcattggccaggcatggtggctcactcctgtaatcccagcactttgggaggccaaggcaagtggatcacttgaggtcaggagtttgagaccagcctggccaacatggtgaaaccccatctctactaaaaatacaaaaattagccgggcatcatggcggatgcctgtagtcccagttactcgggaggctgaggcaaggaaattgcctgaacctgggaggcggaggttgcagtgagctgagatcgggccactacactctagcctgggcaacagagtgagactctgtctcaaataataataattataataaatatataaataaataaaaataaatgcagagcactgaacaggggttcttgggaaaggaggtattgaaggattgctctgagggggaccccagagggatgggagggataaggaagaggaagctgctaagcctcaattgattccacaggaagctctggagcacaaatggcaccacaaaggtgatcaaccttgaagtaaggggccagccttttatcccctcatatcagtgggacattggctacagattgttggagggaggggtgcgggccggtaacctcccaggtatttgtgggcaatgcagctccttattggctgagagaaggggcagctgtgagccactagcagccagccctcccagcatctgggtgtaagaatgtactagggatctaggcaggacagccaagctcacaggactgttgtaggcaccagatgagggtgcttcataacgggggggcatcctatacacttggggggcatttggaggctgggtttgcagaagaagttcagcaaagctccttccatccctgaacatcctggctctattgaggccaactcagcttctcttggccctgtcctgcccccaggccaagatcttggagcatgatgatgtgagctacctgaagaagatcctcggggaactggccatggtgctggaccagattgaggcggagctggagaagaggaagctggagaacgagggtgggtgccagccctgggggaggtgggggctgcagcccacccagcctactcttcccctgcccagtctcagcctcttttttccgcaaaagtctcagaggacctcccaggtggttaagaggatgggctatggagtcagactaaggttcaagtcataacttggccacttcctagcttagtaaatgtggtcaggttctcccctctctgaaattcagtttcccatctataaaatggggataatagtaggacctgcctcaaagagctgttgagacattgtgtgaaataatacacgtagagtgcttagatcagggcttagcacacagtaggtgtttaataaaggtaggtgaagatgatgttaagaggcagctcatagatgtcatggttagggccagaacttgttccctctcgatgggtccagtgttgtttccagcatgtcacaactgataccacaagcacaagaccttatgtcccgaacagagacatcatcatgcatactgaatactcggttgctcccccatcacctcccttacacaacttgatggccactacccaccacaccatcccacttgccctgcccaagaatgcattatagctccttcgtgctccagccagacatccaagctcacccagactctcgttgaccttgactcttcctgctcccagctgggcctctaaacttggacatgccagcttcattctacctccatgcttttgctcccacagcccctccctcctggagcacccttcctacaccactccactccattttgcctgttgcacaccatctttgccacagcccttcttcaaatctcattctgagcttcccatcttgctccgtttaagacctgtgatgagtcttgtctcctgaacaatgcaaatttatggtgcatttgcaacagcctcctgcacatgcatggctatgtgtatgggaaggccgtagagcccagggtctaaacagatggggttagagtaagaaaaacttgaaatagagttccagctttgctgcctcaaatatgtaaccttggacaagttgctttccctattgaagcctcagtttcctcatctataagatgggatggtaataatacaacttaaccttgtcttgctggactcttgtgaaaattcaatatactcagcacactgcctgtcccattactagtttaatacatatggcagctaaagggacacacattctccagatgagaaaactgaggctcagagagatgaagtgagttgctcaaggtcaggcagctcatagatgtcatggttagggccagaacttgttccctctcgatgggtccagtgttgtttccagcatctcacaactgatgccacaagcacaagaccttatgtcccgaacagagacatcatcatgcatactgaagccagctgccttaaatcatttctggaaacaaagcctggtatgactaagtgagtaaaaaaaataacgcacctcaaaggggaacttttggctgggcacaatggctcacgcctgtaatcccagcactttgggaggccgaggcgggtggatcacctgaggtcaggagttcgagaccagcctaacaacatggcaaaaccctgtctctactaaaaatacaaaaactagctgggcggggtgctgggttcctgtaatcccagctactcgagaggctgaggcaggagaatcacttgaacctgggaggcagaggttgcagtgaactcagattgcgccactgcactccagcctgggggacagagagagactccatcccctgccccccaaccaaaaaaaaaaaaggaactttcctgtttctatcctaacggtagctaaggggagctgttgcagagttaatggctctgaggggccaaaaggcttggtagttcagagatgggcctttgggggacagagtcccagctctgccatgctctcggtgggtgaccttggacatcaagtatatgttattcacttatgcattagtttcttaggacttccataacaaaatactacagactgaggggcttaaacagcagaaacctattgtcacacagagctggaggctagacatctcagatcaaggtgcctgtggggtgagtttctctcgaggcctctctccttggcttgtaagtggctgccttcttgccgtgtccttacatggcccttcccctgtgctgcacatgcctggtgtctttgagtccaaatttcctcctataaatactttagtctgattgaatgaggacccaccttaagctcttcattttaaggtaattatctctttaaaagccctgtttccaaatacagtcacattctgagattttaggagtgtccaatcttttggcttccttgggccacattggaagaagagtaactgtcctgggccacacataaaatatgctaacactgacgataactgatgagcttaaaaaacatcgcaaaaaattctcagaatgttttaaggaagtttatgaattagttttgggccacattcaaagccatcctgggctgcatgtggcccgcgggctgcaggttggacaagcttgctctagagcttaaggcttcaacatgtgaagtttgtgagggtcacagtccagcccagaaaaatctatatatttaatagagcttactgtgtgtcaggccctgttctaggtgtttcacagatttcaactcacttaatccccataacaaccccaggaggtgggtaatatcagcgatcctgtttaacagatgaggatcctgtttaacagaggaggaagcactggctctgggctctttcctgttctataaaagggtgataggttgggcacagtggctcacgcctgtaaccccaacactttgggaggctgaggcaggtggatcacttgaggtcaggagttcgagaccagcctggccaacatggtgaaaccctatctctactaaaaatacaaaaaattagctgggcatggtggtgggcacctgtaatcccagttatgtgggaggctgaggcaggagaatcacttgaacccaggaggcagaggttgcagtgagctgagattgtaccactgcactccagcctaggcaccagagcaagactctgtctcaaagagaaaaaaaaaaaaaaaggcagggggtgataacatgagtgcctacgtcccagggctgctgcgaggatcaatgagcaaatgcatgtaaggggcttagcacagtgcccggcacacagtacagaagtgttcatatacattgtgatccagagagacccagggtctgaactggatggaggctagggtggatggttctggagaatagcctcagacatgcattccttgtgggattcctaggctgggaccctactgctgaccgctgtcctgaggtcttctgagaggagacagcattgcactgtcccatggtgagataagtggggttgctcaagatggagaggtgtcgacagtccttgcatccctctggggctgggggaggtagcagaagccccagggaagtggttatggattttaaaggtctgactggctgggcccacatggcctcggttgctcatccaggttccctgaacctgactgggttaaacacttttatgccttccatttcttccctcgtgggcagagcccagtgttggaagggattttaatgtcacagttgagaccccttgcatagagccagatggctttgatgcagattcctgatcaaccacctcctagctctgtgaccttgtggaactcacttcatctctctgagctcatctgcaaaatgttgatagtaatagaatcaaactcatagcagggttgctggtggaagatttgttaagatagtaaatgttgagtattttgcacagtgcctggctcaaggtaaaatgttctaaaaataatcattattaccattctctttcattcatgtattcaaatatttattgaacacctactagatggtaggtcctagggataaactaatgagtaaaactcagacctcattcttggtttcatggagtttgcagtcttacagaggaaaaagacattagtcaaataatcccataagtaaacacagaattgcacacagcgataagtgttaagattgagagtaaatgagcaggataaagtggataaagtttccctgagaaggtgatattcaaagtgagacctgaaggatgagaaggagcctggagaagaatcagggcagatatgacccagactgagggatgccatggagtgggagagaactgggaactcttcaggaatggtctgctgtgtggggagtcctcgggaaagtggtgggaatgaggggagagctggagcgggtgaggtgagatcacgggcctcagagcctacatttacaagtttggattttatactaagtacaatgggaagtccctggagggctttgaggagggtattgtatcagttagtttctgctgtataacaaaccattgcaaatctgagtgacataaaagaagggccttttatttgttcatgatatgtggcttggcagtatgggctgggctcagctgggacggcttgcctctcacacatggggagcggctgacctcattcctgcatttgcggccagcaaatttaagacagtaaatgttgattactttgcacagtgcccagctcaagatgaaatgttctaaaaattattattatcaccattctttttcattcattttttcaaatatttattgaacatctcctagatgctaggtcctagggataaattaatgagcaaaatccagatgtcattcttgctctcacggagtttgcagtcttagaaaaaaaaaactatgagtcttagatggcaggagcagcaaagccatcaagatgcacacattgcaaagtggcatgtgtacaggaatgggaggaactcatggccctgtttgcagtctccatggggctgagttgttccggttttatatttgagagaattccaactgctgcgtgaaaatggatttcaagggagacagaggggaggccggtgcagcagctcaggtgagagatgatgttggcgtggactgagatggttgcagtggatatggtgaggtgtgaatgggcttgagaggtattttgaagataaaatgagcaggaatttacatgagggttgggagtgaggtaaagagaatcaaaagtaattcctgggctgggcacagtggctcacacctgtaatcccagcactttgggaggccaagacaggtgaatcacgaggtcaggagatcaagaccatcctggctaacacagtgaaaccctgtctctactaaaaatacaaagaattagccgggtgtggtggcacgtgcctgtaatcccagctatttggaaggctgaggcaggcgaatggcttgaacctgggaggcggaggttgcagtgagccaagattgtgccactgcactccaggctgggcgtttgggagacagtgagtttgtgacacccaagagagaatgtcacagaagccattagatattccagactgactctcaaaggagaggtcagaatttggagattcaggagttctcagccaatacatggtgtttaaagctatagaattggatgttttcatcgaggaagagagcagagagagacaaaaagaggaatcaggacctgctgtattagttatctgtgtggcataagaaactgctgtcaacctcagtgtcttaaattttttttttttttttttttttttgagacggagtctcgctctgtcgcccaggctggagtgcagtggcgggatctcggctcactgcaagctccgcctcccgggttcatgccattctcctgcctcagcctcccaagtagctgggactacaggcgcccgccactacgcccggctaattttttgtatttttagtagagacggggtttcaccgttttagccgggatggtctcgatctcctgacctcgtgatccacccgcctcggcctcccaaagtgctgggattacaggcgtgagccaccgcgcccggcctgtcttaaattttaaaatcatttattatgtcacacattttctgtggatctggagttctggagcagctgagctggacagctctgagtcagggttgcttgatgcaggttgccttcaagctgtcagctggggctgcaatgatttgaaggcttgactggggccggaggatccacttccaagctgccttattcatgtggttcttagctagaggcctctatcccctgctggctgtcggcaggagactttagttccttaccatgtgggcctctcaataggctgcttgggtttctttacagcatggctgctggctttccctgagcaagttattccagagaaagagaagacgcagaagccacaatgtcttttatgatctactgctggaagtcactctgccccatcattcattagaagtcatgaaatacagctgctattcaaggggaggagaattgggctccgctgaagggaggagtatatcaagtgatttgtaggtgtactttaaaactgtcgcagctgaaccaggcaaggtcacgtgcacttgtaattccagctagttgggaggctgaggcaggagaatcacttgagccccaggagttcgagaccagtctgggcaacatggtgagactctgtctctacaagaaagcacaaaaattagctggatgtagtagtacatgcctgtagacccagctactcaggaggctgaggcaggaggattgcttgagcctaggaggttgaggctgcagtgagtcgtcttctgggagacagagtgagaacctgtctcaaataatgataataataaaaacgtaactaccacatctatgcagaggttctcccacactaagcgggtatcagcgcagaggagtcagcaaagcccactgaggagtggccagtgaagtaggaagacccacatgttaggaggaaccgtgggaggattgggttttaaggagacagaatggtgtcagtgctgctgggagcttgagcaagccaggataagaaagtgtgccctcggctttctaccatggatgtcagcggtgacctcgccagaagcatttcactgcaacctggggcaaaagtcagattggaatggactgaagagtgcatgggaggagaggaatgaaggcggtgagtgtagatacctcttttgagaagggtagaggtgaacaaagaaggtggtggtggctgaagaaggatgtggggtgacaggaggaattgtttttggacaggagatgtacaaatgtgttctcatgctggtggaaacagtgcagtagaaagggggaatcgggggttcaggacagcgatgcagaggccacgaagacaggaggggcgtggttcaggcaggggccccgtagaaaacagaggacatcttcaaacaggggaaatggaagacggttcaataaagggactctttaccaagccacaggcaggatgcagggacatcccaaggcagagaggagtaccccaggcctgaagtcttgagatcacagggtcatgagagcagattcaggaacctggacagaggtggtcactgccagccgtgatgactcgcagagaggagctgagggaagtcagtccaacatcactgttgctctccctcctctcccgcccctgcttcctacttgcctaactttccgaagccagagggcatgagccccggggggtggagccagcaagtgagtttcctggggtgcagaacaacatggagaagggggaggagcacctagaaaggcaacctgaagagatgtggagacgtggcatggagcaggtgcagagggcacatggagggcttggccgtggggttaggacacgccctgcattggtccgcatcagcagtatggagcggttttgcagcattgaggtggggagtgtgggctttcatctctgaaagctgctatcttctgaacgaaccatgaggtgatgtcattggctgagagggagctggggaaaggatgtgagaagggtgagaagagaggatgaaaagatgcaattgtctccacagggagcaggaagcactcaagaaatataataggaccctgggcagcacggagtgccctcctgggctttgcggtcctgacattaaagtgtaaccagttggcctcattgtgagatcgcctccagctggcagacccagagaagtgcagaaggggctcatccaggcctggggtttgcaaagggaacacacaagtagaggagaagagaggagaacagggaagggatcagataccagattgctgcccaggcgcacacacaaacacggacatgcatagaaggccatcagcatttgcctacaaacataaacataggcatgaacataatagtgaacatgtctgaggcaaacatccagattcgcctgggcttaaactgcactcacatgtgtggtaatcccacaccacgtggacacagatgcccaggagagtgaatatccacatgcatataaacaatcggctgcatggatttgtgcaggcagacacagggcaaacatgcagtctatgcgggatacagacgcatgaagagatctgcacacagacctgagtaaagaactcatgtactgaaagcggcctgagttgacgtggagatacctgctgtgtctatgctcatttgcatgtggaaataagtagcttaatagagtggttacaaccacagaatctggaaccagatggcctaagttcaaatctaggctctgctctgacacatattagctgaggtttcactaagttacttaacctctctgtgcctcgattgcctcatctgtaaagtggggataataacatcacctttatagagttgttggaagatccagggaattataccacactgtcctggttcgcctcctatctcttgggctgcttcttctcatgtcccttgctggtttctccatgttgcccagtatctaaacctagtccctgggcctgttctctgatctgtctacccacactcccttgctggtatcatgcagtctgcagctggggacttacgtcacttgatcctttcactgtccgtcactcccatcacaatcgcacctccctccgtacctagtggtgattccctggttcatcattaggagaactttcgtgcctgcacattcaactccctggccctccatacttgctttgcaaaacctcaaaccttgttgaacccagctctccacctactcagcgccttcacctgtgaagctatatgtggctggagaaacacacaggatgctggcaggactcactttgtattcatgactgcaagccttaggtgacctcaatgctgccccaagcctccccccttcactctctagatgactcctttatgccttcttcctcctccgccctccagccacctcccccacatcctcactcagaactgatcactttaggttagtgcaaaaataattgtggttttggccattaaaagtaatggcaatatatcactgagaaaatcaaagcattagaaagagatcttcacagctctgatccccacaacgacccacccactgtatatcatcaattctaagatgcatctttgttagaccacatcttagcatctctgaaactggaatgtttattccagtcaatagtttaattctcctttcttacttttggataagtgtcttatatttaatagtaacttagatttgatgaaatacggtagtatatatgccctcttgttaccaagggatggactgttcttgtccttgtccaaggatggaagggattgtcctttaaaaccaatcccttccctagtgcaccagatcccatccactctcatccctgtaagaacaccacatccgtaattctatccactcttccccatagaatctttcccttctctgtggcatcatccacaaacacatgctattttattcctcccaacttatgaaaatgctcttgacttgtctctcactactggcccatcctccccattctagcaaaattctgtggcagaatgatctttgttcaccatctccaattcctctcctccctttctctttgaactccctccaaaccagcttttaagtcagcattctactccagctgctcttgccagggtcgccagtcggtaaacgcagtcaccagttctcaggcctcctatttgacctcaacacagcatgtgaacacagctgagcactgtctcctcttcggaaccctgtcctaagttgacttgctggacaccacactctcctggttcttctcctacctgaaaggcggctccttcttatcatctttgctggtttctcttggtgtcaatatttaaagtttgcagagggaccccgggttcagtcccttgccctatttccaagtctggctacactgatactgtccactctcctggctttaaataccacctccacattgatggtgcttctctgagcctggaacctgcatcactaactcccaactcattatctcccctcgggggcccatcaggtgtcttctttgtttgtttgtttgtttgttagtttttgagacagggtctctctgtcacccaggctggagtgcggtggtgtgaaaaaggctcactgcaacctcgaccttccgggctcgagccatcctcctgcctcagcctccctagtagctgggaccacaggcgcacatgctaccgattcagctatttttaaatttttctgtagagaggagggtctcgccatgttgcccaggctggtctcaaactcctgtgctcaagcaatcctcctgccttagcctcctaaagtaagggagagagatgtgagccactgcacccagcctcatcaggtgccttgaagattacctattcaaggataaccttctgatgagagccttcattacactttacccctttccctgtgactatgagcctcttgaggggagacattgtattgtgtcgtgtcttcatgcccagcacatactgccaggtaaccacttgctaaatgaatgaatccgtgaccaagaagatgtagagcagaaggagggggctcaggttttgacggtagggagcactggactcatggaattcctgaactgaaaggaacaacctgttcaaaggtgcgggggcaagcctcccaggaaagcagccatcacaggaagggaagggagaggggagagcattccgggcatggggtacagcagagacaaaggcccggaggctgaagtggcagcttgttggggaagacagtggaccaatgggcaattcatgaggagtcaagattatagacatattaaagctaaactcactcttgaaagggcttaacgtctaggcacaggaacttggacattaaggtgtagtcagtgggggagaattaaagatttttgagcaaagaggagatgtaagagaccaaagatgctccagaatttcaggtcaaaacaactaggagaaaatattgcacaaacaagtgttttctaaaaatgcaggctaattttttctttcttaatcccaaatgcaatagtcaagctaaatttagatgacacaaaaacatggtgataaataatgtaaaaccacgttgtgtgagttatcctcttttgattacatcaaagaaagagtattagtaagatgttagtgcttaacccctttataatatgtgtttaacatctgcccctttcttaaaatcaaaatgaggccaggtgtggtggctcacacctgtaatcccagcactttgggatgccgaggcaggcggatcatctaaggtcaggatttcaagaccagcctggccaacgtggcaaaaccccatctctagtaaaaataccaaaaaaaaaaaaaaataatagccaggcatgatggtgcatacctgtagtcccagctacttggaatgctgaggcagaagaattgtttgaaccctggaggtggaggttgcagtgagccaagattgcaccactgcactgcagcctgggtgacagagcgagactttgtcaaaaagaaagaaagaaagaaggaaaggaaggaaggaaggaaggaaggaaggaaaagaaaagaaagggaaagaaaaaagaaaaagaaagaaagaaagaaagaaagaaagaaagaaagaaagaaagaaagaaagaaaaagaaaggcagaaagcaagcaagcagggagggagggaagaaagaaagaagccagtcttgggagcagatactttgacgggcagtattatccagctggaatttaattgcatttgttttgtttttgttatgtttacttttaccattgcagatagtttatagtgaatcatttaatactactgttaatgatacagtttattttttcattcatcaatcattcagtaaagatttattgagcacctattgtatgccaggcacagttctagatgcagaggatgtagccacagacaagacagaccaaaatccctgccctcgtggcgtttccactctagtagaggacagcagacaataaacaaaatgagaatgtcaagtagatggtgcaatgtggcgctgtgttctatggaggaaaacaaagcaggagaggggagagtgactgctgggtaaggtcttcctccacctcctttgcatctttgctcacatgccagcttctcctgggcttcacagaccaccaatttataatttccatttaaaacttccattttatttttttaatttttatttatttatttatttatttcgagatggggtttcgctcttgttgcccagggtggagtgcagtggcacaatcttggctcactgcaacttccgcctcccgggttcaagcaattctcgtgcctcagcctcctgagaagctgggattacaggtaaccgccaccatgcctggctaatttttgtatttttagtagagccaccccggcctcccaaagtgctgggattacaggcgtgagccacggcgcccagccaaaacttccgttttaaattggcagtctgggaagcccaggagaaaatggcatgtgagcaaagatgtgaaggaggcagaggaatgagctctgaggctgtgcaggagaagattgaggcagggggaacagcgagggcaaaggccctgtggtaggaatgtccctgatgtgaggagttgcaggagtccaatgtggctggagaagagtgaggaagcgggagagaagcagactctgaggtctgaaaggtacctgggggctggatcacacagggccttacagggcttgggagggtttccgcttttactctggccacaacagtgcatcatcattagaggattctgagaagggagaagtgacattctccgacatttaaactttaacatgaccactttggctgctgtgctaagaatagactctaggggacaagggcagaaacagggaaaccttttaaaaggacattgtgataacttagaagataatggttgtttggacaaggacggtacaagtagaggcagtatcagattctggaagatatccaaagttatctgaagacaatgctgatggaaattgctgacaaattgtatgtgggggtgaaaaagaattcatggtggggccgggcgcagtggcttatgcctgtaatcccagcactttgggagaccgaggtgggcggatcacctgaggtcaggagttcaagaccagcctggccaacattgtgaaaccctgtttctactaaaaatacaaaaattagccaagcatggtggtgcacacctgtaatcccagctattagggaggctgaagcgggagaattgcttgaacctgggaggtagaagttgcagtgagcttagattgtgccactgcactccagcctgggcaacagagtgagactccatctcaaaaaaaaaaaaaaaaaagaaaaagaaagaaagagaattaatggtggttccgaggcttttgggcggagcaactgcaagggtggaggttccattactgagatggggatgagcatggtggctctggggggaattccattttgagtttgaaatgcagagcagacaccaagtggaactgtcaaaggagtagttgtatatgtgtctggagtttcatgacacatatttgcactttatttatttatttatttgagacagagtctcactctgtcacctaggctagagtgcagtggcactgtcttggctcactgcagcctccatctcccaggttgaggcaattctcctgccttagcctcctcagtagctgggattacaggtgtgcaccaccacacccagctaatttttatatttttagtagagatggggtttcaccatagtggccaggctggtcttgaactcctgacctcaaatgatctgctcaccttggcctcccaaagtgctgggattacaggtgtgaaccaccatgcctggccacgtatttgcactttaaaagtcagctgatgtatcagctgtaaaatgaggataagaaaacaaaagaataaaaaaaaagaaaaacagtcgatttaaacaaaaaaataataatagaagtagcatgaggatatggcaaaaatcactgaagttgtacaggaatgagtaaccctcagaaaatactggggcaggcatgcagaagccagtggagctcatggagagaagcaagtgtgtgtgttaggggaggctgatccccttgcctcctctttcttccactctagggcagaaatgcgagctgtggctctgtggctgtgccttcaccctcgctgatgtcctcctgggagccaccctgcaccgcctcaagttcctgggactgtccaagaaatactgggaagatggcagccggcccaacctgcagtccttctttgagagggtccagagacgctttgccttccggaaagtcctgggtgacatccacaccaccctgctgtcggccgtcatccccaatgctttccggctggtcaagaggaaacccccatccttcttcggggcgtccttcctcatgggctccctgggtgggatgggctactttgcctactggtacctcaagaaaaaatacatctagggccaggcctggggcttggtgtctgactgtcggtgtctctgtgctgtgtgattccccgtgagctctcagtaactcactgtctcatgaacacttggacagccctccccgcccttcgttctgagtaataataccgtcagtgtgaaaacattccgtagtttagaagtagacgttgccaatgctgtgactcaaggccacggctctactaaaagagagagaggaagcgagagagagagagaaaaaacaaaaaacagaaaacacgaatgccttttctatcgattcaaggtctcaagatggaactgtggagactggttaggatctgaggtgagtcccaggatgtttcgtccaccagggcccagattctgggaggtgctggggactcagagggcctgacccctcacctccccttccctcttgcccagggaactcttccacaggacaaagccgacatcaagactcaactcctctaaccggtacctctgaatggggctggataaccggagaccccatgggaggtccctgaagatcagaaggggcttcacgcttctcctggacatggactagcttgagccaaggcagtggcacccaaaaaccaggctgcagtggggacggataccatgagcacaccctctcattgtccttctgatttggtccatgtgttgggtttggccttagtagaaatctctgaaggcagcagccatcatcctcttcctaccttgagtttttctaccctgtgaggtgggactttcagtaaaagccatgttgaccctctctcagaaggtcagtccagcccaagtgcaggggcggatctggaggtggacaaacctaggtccccctcctagcctctgtccaagccatctccttcaatatcccccccttcctgtcactcccggggctgtccctgtactacacggtgccatggagccggggagagcggggaagtctctgcatccatgccacccaccccagtcgggtctcactttcctgtgccttttgcatgttgggaaagggtcttggtgtcactgccgctcatgcatagaaaccaccaaaagccccaataaagcatccaggaggaacagttgcttttcatttctaaacctgtgctgtccatctagttctcattgccaagtgctggagccagaagggtagagatgtgaggtttcagtctcagttcttcacaagagcaagcaagagttgactgcctgtctcaagttgctgggtctggggctggcttccagactgactttccagggctctgaccttaacatcaacccagctcatttaggctcagccctttacaggttacagggcatgtgtacaaccctttgttctcattaacctgtgcaagggccaggtgtagtgactcatatttataatcccagtgctttgggaggccaaggcgggagaattgctccaggccaggagttcaagacaagcctgggcaatatagcgagaccccatctctagaaaataaaataaaataaacctatatatggacctcagggggcacccagggcacatgccccccaccccaatttcccagagggaaaaatgtatttaaaatgcccaaagaacattaaatcaggagtataatgtgtagaatataaggcatggttttacttattttgcaataaaaaaaagtattaagaatttgcacatcttttttcatcaaggtaaaaagaaagcttagtcatccagggccaagacagggcaaaggtggaacttagagaccatgaacactgtctggcaccatccatccccttggctaatcaaccattcacacaggctgggtgtgggctcacgcctgtgatcccagcactttgggagcccaaggcgggtggatcacgaggtcaggagttcaagaccagcctggccaacgtggtgaaacctcgtctctacaaagaatacaaaaattagctgggtgtggtggcgcatgcctgtaatcccagctactcaggaggctgaggcacaagaatcgcttgaacccaggaggcagaggttgcagtaagccaagatggcaccactgcattccagcctagcaacagagcgagactccatctcaaaaaaaaaaaaaaaaaaaatcaaacatccacacagactctccccattcttcattcaacttccactcaagaacaacaatataatactcaatccccacaggatttactgcctcctgcaatgaggacgtgctaaacctctctccaaaaatgagactcacaaagccccatcggtcagtaacatcactctggataacggtggattctcttctcattcctcctctagctctagagatcacacccacacctcaatctactataatattcagatgaaaacataaatttgaccatcactagcattccttatattcaattacacacacacacacacacacacacacacacacaccccaagcaaagaaaatactcagaactgctataggtctcatttctgtaattgattccaaggccactgttgatatttacagtttctcttttttcactagctattctaggttctctttgccctcagccagcacctcagttagttagcgtatttaacctggtgacatgactcagactctggtggtccttagattgctatggtcttccattactattggatgtggaagtattatggggcactgcagacaatcccctattcttccatgctatcattgtgcaggagcaacccagtttagccctggtaatcagctcaattaccccagcctgtagagaaacacactactttgcctgtagtttcaagggtatgaggagctcaaaatggccaagtggcagtctcaacttctaacttaattgaaccattgaattattcctcaatagatgtactcctcccttaggagctataatttctaagctatcaaaatccacagtgtcagggatgggaagcaacagttttatgaatgggttatttgtataatagtgagagtcacttccacttccaccttggcattgttagacccgtgttctctggcagtgggagaaacagcactgtggttggttcaaagtacatactgtatcctgtaggacagcactccacattgcagtgtctcctggctgccactgtaccagtcttcaagagaccatttcagtgttcgataagaccagctgcttctagataagagagtactttcttctagataagagagtacatggtaaggccacaatatcccatgggtataaccacattgctgaatttcttttgcgataatatcaactctttggtcagaagcaatgttatgtgcaataccaacactggaaccaaggcattcataagtccatggatatagtggtcggagaaggcaaacccatagagagaataagtgagtacaaactgctgcttcctctgtgatggaaggggttcaatatgatctatctgccctcagagagctggttcctatggcgaatggtgtcatattaggaactgtgcacacggggcactctgcagtggcattcactaaatcagtcttaatcagaggaagtccgtgttgttgtatccatctataacctctagctcaattaccatggcccttttgtacatcagcctattgagcaagcactggagtggctggggaaagagaatgacagacagctacagaacaaggcatcttgtccattggtttcttgaacaatggtttcctctgcagtgggtactgtttgagggaacatgtgcataggacacaaatatcctcccattctgtgtccactgttaggggtccatccacattccttctcccacagagctcctggttaccaatcttccagtcttctttccatgttcataagcatccggccaaaccatccgtcccatgaatatgtacagatttatattcctggacttctgtctctatcttgatagggcagacaagcagacatactgcttgaaattctgttcactgcgaggatttgccttctgcaatgtctttcggggaattcctgtagtgctgcaaccatccacttccaggtggtgccaggcctgagtctttcttcctccatcaactgattatagggcatttgccaagaggcctctggtgttgactgaggaagaggcagcaatgtggtgaaatagatgccatcgtctgagctgtatcactttcacttgatgatagaatgatgctgccatatatgcctagctttatggcttgatggatcagatgataccaagttcatgatggggagatcaggttgcatagtcacctggtgtctcctggtcaggcgtgtagtctttaccagggcccagtagaaagccagatgttatttctcaaaaggaccattattgtttgcagaagaggacatgactttgtcccaaaccctagggatgtgcactgagattttcctattagggcttgctggaagctccatactggatgcctatgtcatatgtgatttaaataccactggatctgctgggtcataaggctgaactcgcagagcatcttatactgtagcctgaatttgctttgggatccattctaaactggcagtcttatgggttactcagtaaatggtttggagcagtgtacacaaatggatgtattgccaggtacagtggcacatgcctgtaatcccagctacttgagaggctgaggcaggaggatcacttgagctcaggagtttgagaccagactgggcaatttagtgagacccccatcaaaaacaaagacaaaaataagaacaaatgggtgtatgttgcctcccaaatccaaagagggccaccaattgtgcctttttcttagtaggaggtgcagcaacttatctttcacttggaggggatatcctgacatttcctagatccctgggttgctaaaaactttaccaggtttccagaactctgaatgttcatggggtttacataccaccctctggcatgcctgggtcttagtgaatcatctggtgtacttgatgcgtcctgctcattagttacagcatgatgtcatcaatgtagaggatcaatgttttgttacagataatcaagataatcaaggtctctacacactagattatgacagaaaaagaaaagctgacatagtcccatggaagaaagtgatatgctactgccctgccaattaaggcaaatgaggctgggcatggtggctcacacctgtaatcccagcactttgggaagccgaggcgggtggatcacctgaggtcaggagttcacgaccagcctgacaaatatggtaaaaccccatctctactaaaaatacaaaaattatctgggtgtggtggcgtgtgcctctaatcccagctgctcgagaggctgagacaggagaattgcttgaacttgggagttggaggttgcagtgagccgagattgcgccactgcactccagcctcagtgacagggcaaaactccatctcaaaaaaaaaaaaaaatgacttttggtgattcttatcaatttgatatacagaataaacattttctagaccaagagctggatacaaagtgctaaatactgtgttgatttgcattaataaagaaaccacatctgaaaaaactgcggtttgaattaccacctgagggggttcacagtaaaaccttatccttcttctgaacccatcccttttacagtattgcttttagtttactagtctagtgtgtgaggtggtggtggtgtgaagttccaggagctttctcttcgtccttttacctaagtagtcctcattccatgggtcaaggagtcctgtgtaggctccactagctgttaaatttgtttgttccaataacatattcaggacctgggttaaaaatcacagatgggtccacagagccactggtccactcgctatgagatgttttcaaaccaaaactccatttatcacctaatcccaataagcctcattaaaaattatttgttaatttatttacttttacatttctgtggtatatatggggtacatgagacactttgatacaggaatacaatgcataataatcataacagggtaaatggggtatctatcacctcaagaatttatcctttctttgtgttacaaacaatccaattatactcttcagttttttgtttgagatggagtctcgctttgttacccaggctggagtgcgtgacacgatctcggctcactctgcctcccaggttcaagtgattctcctgcctcagcctcccaagtagctgggactacaggcacgtgccaccacacctggctaattttttgtattttcagtagagacgggtttcaccactttggccaggctggtctcgaacttctgacctcaagtgatctccccacctcatcctcccaaagtgctaggattacaggcatgagccactgtgcctggcctctttagtatttttgttttaaaattttgtttgtagagacaaagtctcactatgttgccccagctggtttcaaactcctacactcaagcaatcctcctgccttggctcccccaaattttgggattacaggcgtgagccaccatgcgcagccttttagtgttgacacccttgttgaaaattagttcagtgtagacatactgatttaattctgggttctctattctttcccattggtctatctgtctgtttttatgccagtactatgctgttttggttacagtataatttgaagccaggtaatgtgatttctccagttttattctttagctttggctattctggatctttcatggttctatataaattttaggattattttttatatttctgtgaagaatgtaattggtattttgatagggattgcactgaatctgtagattgctttgggtagtatggacatttaaacagtattaattcttccaatccatgaacatggagtatctttccctttttttggtatgtcctcttcaacttcttacatcaatgttttgtagttttcattatagagatctttcacttctttggttaaattaatttttaggtttttattttacttgtagctattgtaaatgagattattttcttgatttcttttgcagattgtttgctgttggcatacagaaatgccactgatttttgtacattgattttgcatcctgcaacttatcagttctaaatttatcagttctaagagatttttggtgaagtcttttgttttttccaaatataaggtcatattatctgcaaacaaggataatttgacttcttcctttccaatttggatgctcattacgtctctcttttgtctaactgctctagctaggacttccagtactatgttgtataacagtggtgaaagtgggcacccttgtcttcttctagatcttaaaagaaaggctttcagtttttccccattcagtatgatactggctgtgcgtctgccatacatggcttttattgtcttgagatatgttccttctatcctgttttttgagttttttttatcatgaagggttgttgaatttttcaaatgctttttcagcatgaattgaaattatcatgtggtttttctccttcattctattgatataatgtatcacactgattgatttgcatatgctgaaccatccttgcatccctgggataaatcccacttggtcatgattaatgatctttttaatgtgttgttggattctttttgctagtattttgttgaggatttttacatcaatgttcatcagggatattgacctgtagttttctttcttttttttttttaatgtgtctttgtctggttttggtatcagggtaatactgacctcatagaatgagtttggaaataagccctgcttgtgattatagtagcattttgggtccccagggaatagcttcaaatcagagccagtgtagaatataccttgaaagctctgggtatttccctctttcttgaaatttcttccttttctctgggatacactcaggtaagtgttaggctcctctgaagagcttaaaggaaaatagtttatacttgtgacagtcacaggaacttttctcaaggagatctagccttccctacatttcatgggccccagggcactgaactgggtaagagattacttctgcaggacagttctctgggtgtccttggactgatccagttctccccactttcttgtttacaattctctaaaacaacagtagaatgtgctggaatgtaatatcttgacataggaagggactagccagaacttcctgggctctgttccaatccccccaaagcccgccccgaacaggatgtccttcagtgctttagcccagtgatcacattgccctgggtcataaaacccaagccaagctacttccagggtcccactgctgcagtgcaagtgaggcatacacagtcaaggcattatccaccttgggcagcattcctgaggcttgggggaccaggcttctgttgtcctttgctcctatctgtaagtaataaatctgcttcatgtaacttgtgaatatgagtgttctgtcccaccggactcagacaagttggtagccagtgcatggtgagcctgtttcaccactttattagtctgttttcatactgctgataaagacatagccaagactgggcaatttacaaaggaaagagatttaattggactaacagttccacgtggctggagaaacctcataatcatggtggaaggcaaggaggagcaagtcatgtcttacatggatggcagcaggcaaagagagagcttgtgcagggagactccagcttttcaaagccatcaaatcttgtaagacttactatcacaagaacagcatgggaaggaactgcctccatgattcaattagctcccactgggtccctcccacaacacgtgggaattcaaaatgagattatggtggggacacagccaaaccatgtctccacttaaagttaggtctctgctcactggacccaaagtttttctgactatacagagcaagtaagacttaaactgctcaaatgtttgatttctagggacaatatgatgaattcacctccagtaaaagtccctgtgggtcaaaatattccagtggttgctatggctctgctgctatgatggagtttgcacccaactcatctctggcagtaagtgctgccacttagactctgccactcctcatcaaaaccaggaagcccatttcagtggtggcacttcccactgtcacacctaggctatagaggaaagtactccagggcttttgaatggtactagtgctttctctgccagtgcttgctcagtgacttagtgaaaggagtgtcctctgggcccccctggtggacttaaatgatagggttatttaaggtgatagggtcagggtcaagtcatacataacaactggctgtggtggggcacctgtaatcctagctacttgggaggctgagatgcgaggaccaatcgagcccaggagtttcagatcagcctgcgcaacatagtgagaccctgtctcaaaacaaattaaaattaaaattaaaaaagaaagatgtcaccccatgatattttaaaaaaccgtacatagtaaatccatcccaacatttctatttccttaaaacttcgaattcctcccttaatagtatcttagggaaattctagcatctcaacttcaatgaatgtagaccaccactaagtccaggtttcagtcagtcaatccaggaaaccattagagtcactcgcaaatgctgagataacatattaaatctagactctccagaaaatgcatgaatatccataaatttaacccagcctaatatggtttgttcttcttggtctggcatctttatgttccattgccacacatactcccccaggtctctgtcaacatacatcaacaaaacatttttattctttggtatcatagactctctttgggtcagactttgaacttgctctcctggggtgtgtaagggtctggaagcagtgaagggtgctggagttggccttgaggtgaggcacccccttgcaggaaactgtcttggatgaggtcattacgagtcttccagcaagagaatgatcttctcagaagaggaggagggctgcttccactgttaaagaggacctgggttgatttggaggttcaaggttggcagattcatctgattttacccacaggggtccaaactgtatgtgaataatggaatggagcccatgagcctgccattgctactgaatgactgggggcactgctgtcgctactgaagctcatgttacttcactgctgctgctgaaaaaaaaaaaaacagaaacccccactcctgctgattgctaaaatgcttttcatgttgttagagcccaggatcatctatagtcaccttcagtcacccactgccactgtcagagcccatttctagaatcagagaaaaaattaaaaatgtcctcgtttcctccacctcccaatctccaccagtgtcttccactagcagagcccagaggaaagcaggatgagaaatgcacaatgcaggcttcccatcctggggatacagaggagcacgtggaggggaagggtggaggtcagagtcaacgggcatcgcccaggacactaaccctgctgaacttcaggtccctcgcctcaaatacaaagttaaaaattcaccccctacttacctctgcagattatgttgaggaactaagataatgattgtgagattactttataaattaatcaagtgctgtacatttgcaatagaatgttattattccagttattattacagttgcatgggttatttatattgttgttgtaataggtactgggactgccacccttgctcccccagtggctgggaggattggctgttaatggctcacagctgagtccctcttggggcactgcctcagctgaagggagctgtctcattcaaggttactccagttccctaagggtagcttacatccagcgactggtaggtacagagatagaaaggtctgaccctccttacttcaatttaggacatctctgaagggccatccgagacccacaactctccacaggatcagctaaggttctggaacaactgcatcatagttcaacttctctctctgcccttccctgcttgtctcactcccttgcaggtgatgtttccaagagcacttcccaataaaccttctaaatgtaaatctcatctcagagtctgtttctgaggaaaccatgctaaagcaattatcgtggtgctttcaagtaccatcacaaacatctgacccttaagaccaccctaagatgcagaaagggcacagagtgttacacatactccttgttcagatgaagaagttgaggctcagtgagattaagtagctcacccaaggttgcacacaaagtcaaggtggagtcagatctgagcacagctctcttgactctctgacaggtgttttgaccatttcacttccagggagaaagcacagatgcctgtttggggggtcccaaggattagagctgggaggatgcttccagtcagcctcttctgtctgctggagcagaagcagattagtgttgccctgggctcgggatccctagcaggaggacaaggaggagaatccatttacaaacactccggaagcacctaccctgggccagagtcattaaataggacccagtccccacccccagggagcctccagctttggggctgaagaagagagcaatattgcttgaaggtaaggggaactctggaagcaggatggaaagcaattttggccagaacaataagtgaaagactgatcagcaggaagagtctgctgagatttggggatgactgcccacagcaaagacagagaaactcccatctcggtttggagacagggagggtcttcagttgttagaagagctggcaactcttcctagaatctgtggaaagactgttgcccaaatgagctgtctccaataaatggccaacacacagtagcttttctaaggatatctgcatgaagagaatgaggaaccccagcttggagaagtgggaataaaggagatggaatacaggggctgggaagtgcagaatcattagggtgaacgctgagctgttttaacaagagggaagaaacacctggagcttaagagcgtaaaagttcaggtatggtggctcacacctgtaatcctagcactttgggaggccgagataggcagatcatgaggtcaggagttgagaccagccaacatggtgaaaccctgtctctactaaaaatacaacaattagccgggcatggtgggagtcacctgtaatcccagctactcgggaggctgaggcagaagaactgcttgaacctgggaggcggaggttgcagtgagctgagatggcgccactgtactccagcttgggcaacagagcaagactccatctcaaaaaaaaaaaagagagtaaaagttcagttatcttggggaggctgaggcaggaggatcgcttaagcccaggagttcaaatccagcctggaaaacaaagtgaaaccccatcactaaaatctttaaaaggggtaggggaagttcagttatctcccattaacaagttcagtggtgcagactggccggtgtctgtttgctgactgttactccaccttccagtgcattgtcttcatctgcatggtcaaaactcgatcatgagaagccgggttttatgtgataggacaggaaagagacgatggaggaacatatgcccaatagtttaaggcctagacttgaaagagcaacatatcacttccgctcacattccaatggtaagaatggagggcctcacccagctgcaaaggaggctgggaaatgtagtatctggctgggtagtctattgctaaggaagaagagaacagattttcctggacagctagcagcctctggcataaggaataactgtgaatgagaagaagatcaggtagactgctggagaaaatggcagactctggctgggcgcggtggctcacacctgtaatcccagcacgttgggaggccaagatgggtggatcacctgaggtcaggagtttgagaccaacctggccaacatagtaaaaccctgtctctactaaaaatacaagttagccaggcatggtggtgcccgcctgtaatcccagctactagggggaggctgaagcaggagaattgcttgaactgggaggcggaggttgcagtgagccgagattgcgccactgcactccagcctgggcaacaagagggagactttgtcttgaaagaaagaaagagagagagggagggaggaaggaaggaaggaaggaaggagaaagagagaaacagagagagagaagggagggagggagggaggaaggaaagaagaaaggaaggagggaaggggagagagagagaaaagaggagaggagaggagaggaggagaaagaaagaaaatggcagactcggtatgggctggaagacattggaaacccctcacccacctgttctacatatgggacaccaaggccctgcatggggtgatgtctggtttggtcaggatcccactgtaagaggactagagccctaggagtcctttccctggtcccattatttttatttttatttttagagacagagtctcactctgttgttgcccaggctggagtgcagtggtgagatcatagctcactgcagcctcaaactcctgggctcaagtgatcctcccatctcagcctcctgagttgctggaactacaggcgtgcaccaccatgcctggctcctggtcccattctgtctctcagaacatcatggagaaaatccagagtgggagacaggaagtgtcaatacataggcatttacccagaaatctgtcagctgcccagccttctatgagttgccatcaggtgcttcagaaatgaagacgacggtggctatcagagttcagtagtctgatggacaacactgccaggactgtggtagtaggtgtccccaaagtttagactgttaagaaaggtctctccatcattacaggattcctgctggggaggacagtaagggcttctaaagggcatattttctttagctcattggttcctcactgccaaagtcacagactcaattgcctagatcacatcagcttatctccaaagacctgtttggttcctttctagcaacctacattacctaaaggccttagttttctcatctctgaaatggagctgataataatagcttccattcattgactactaactatgcactctgaaatttacataaattatttctaaccctgagaagtgcagtttttatgtttcatggatgagaaaactgaggctcagagagttcaagtactgaaggtaaaggcagtagattagactattcgtcttccccaattggattgtacattcctggcctttgacatgaaactttgcaggacctcccactgtcggtagagtttattccctgccccattgatgcgcccacagaaggttagaggaaggatgtgtcaggagcagaggccttattttatttatttatgtatgtatgtattgagatggagttttgctcttgttgcccaggctggaatgcggtggcacgatcttggctcactgcagcctctgtctcttgggttcaagtgactctcctacctcagcctccccagtagctgggattacaggcacacaccaccatgactagctaattttttgtatttttagtagagacggggtttcaccaatgttgaccaggctggtttcaaactcctggcctcaggtgctctgcccaccttggcctcccaaagtgctgggattacaggcatgagccagcgcgcccagccaagcagaggctttaaatgtgctgtatggtttggccaaggtttgggtgcctcagtggtcttgatgagaagagcatgcccccatacagttgctgccctttaagcctggacaccagaatgaaacaagtggaacagcagagcccagctgtggcctggagccaagtgtagccaatgggcagcctgatgcggaactcaccagctgaggccagcccataccagcagagctgcagttgatctgtgagcatttgtaagcctgtgagtttggaggtggcttgttgtaaagcattattgtaaccacccaatgggttcaccttacccactacctagacacacccaatgtatcaagacagaagaattgcaatgaagagagggtaattcacctagagccagctgtgcaggagaccggagttttattattactcaaatcggtctctccaagtattcagggatcagagtttttaaaaataatttgggttgctgggtgcagtggctcacatctataatcctagcgctttgggaggccgaggcgggtggatcaccttgaggtcaggagttcgagaccagcctggccaacatggtgaaaccccatctctactaaaaatacaaaaattagccgggtgtggtggcacgtgcctgtagtcccagctacatgggaggctgagagaggagagtcgcttgaacccaggaggcggaggttgcagtgagctgaggtcacactgttgcactccagcctgagtgacagagtgagattccatctcaaaaaaataaagtaaaaaataaataagaaaaataaaaataatttggcaggcaggggcttgggaagtggggagtgctgatgggtcaggttggagatggaatcatagggggttgaagtaaggttttcttgctgtcttctgttcctgggttgaatggcagaactggttgagcccagttaccggtctggttagtgtcagctgatccatggagtgcaggatttgcaaaatatctcaagcactgatcttaggttttacagcagtgttgttatccccaggagcaatttgggggtgttcagattcttggagccagggactgcatgacccctgaagtgtaatttctaatcttgtagctaatttgttagtcctgcaaaggcagactggccctcaggcaagaagagggtctttttgggaaacggctattatcaattttgtttccgagtcaaaccatgaactgagttcctttccaaagttagtttggcctacacccaggaatgaacaaggacagcttaaaggttagatgcaagatggagtcggttaggtctgatttctttcactgtcataatttcctactataattttgcaaaggcggtttcattattacagcaatctctaatacaatggcagagctgggatatgaagcatcagatgtgttaggagccaaagcctttgctattttctctatggtgtaggttgttggtaactacaggtgagaaaatacagtaaaaatgtcagaccctaaataaaaaaatgaggaacaaatgcttgttattaatgttattcatggttgctttattattatattgatgatactaagtcatttcagggttgttgggggatatttaggaactatagtgcccaggcttctgagagagacatccttaggcaaaaatataatattacgtagcccccataggtgcctgacattttaaaacttatattttccaacccgtgacttcattaaggcaattaaagatggccaggcacggtggctcacgcctgtaatcgcagcactttgggaggccgaggcgggcagatcacctgaggtcgggagtttgagatcagcccgaccaaaatggagaaaccctgtctgtactaaaaatacaaaattactcgggcgtagtggtgcatgcctataatcccagctactcaggaggctgaggcaggagaactgcttgaacccaggaggcagaggttgtggtgagccaagatcgcgccgttgcactctagcctgggcaacaagagcaaaactccgtctcaaaaaaataaataaataaaataaaaaagacaattaaagactagtgtggcagaaagtattatcctcacttcgtagttgagtaaccagctcagaaaaacgaagtgatttgcccaagatcatacagctgaggagctgattggcagatctggaacgcggtctgcttggctccaggtcgagtgcttctaataactccagaagagagtccacttatgtccccatccattcaccccataccactcccatcagcacggcggggggtgtgcctggcagatggagcatgatcaggaaatgcaggcagaaggcaggaagggctgagaggagtggagggtggaaaattaactacagcagcttgttagggcagggccccaataactttttctttttcttttttttttttgagatggagtctcactctgtagcccaggctacagtgcagtggtgccatctctggtcactgcaacctctgtctcccgggttcaagcgattctcctgcctcagcctcctgagtagctgggattacaggcaggtaccactgtgcctggctaatttttgtatttttagtagagatggggtttcaccatgttggccaggctggtcttgaactcctgccctcaagtgatccgcccacctcaacctcccaaaatgctgggattacaggtgtgagccactgcacccgacccccaataactttagaaattaacaggctaaccagaggtggctcccaggctcccacccacctacctcctaggcactcccacaccccagatgcacatgccctgggcagccacaccctgacagagaagacatggcaagtggcagggctcagtgagaaggcccccagcctggtccccaaaactaagcagcccaggaactagtgccaggcagcccttagctcacctttgggcagatagcacctcaaataagatggggacctacttaaccttagccaaaaggacaccacagacacaatgtgccctttctttttacagctctcctaaaaaacagttcttattctccctcatcccctagtgaaccctgaaaccagactgcagaggctggagcacggggacccggccttccacattcactaactgcacttttttctttttttgagacagggtctcgctctgtcacccaggctggagtgcaatggtgcagtcttggctccctgcagtctcccgagtaactgggaccacaggcgcataccaccatgtccggctaattttttttttttatttttagtagagacagggttttgccatgttgcccaggttggtctcaaactcctgagctcaagcgatccgccctccttgacctcccaaagtgctgggattacaggcatgagccactgagcctaccctgatggtatattttgactacccatgagtcaataaaaatttaaaagtcacatgcatgggttttttccccctgattttaaagtaagttatggttctgctggcacatcagagatttactgtgcacttgaaagacatttatatagtacctcccacgtgctagttcctgttctttttattttattttatttatttattttttgagaccgagtctcaccgtgttgcccaggctggagtgcactggtgtaatcttggctcactgtaacctctgcctcctgggttcaagtgattctcctgcctcagcctgctgagtagctgggactaaaggcacccaccaccacgcccggctattttttttttttttttttttgtatttttagtaaaaatggggtttctccatgttggccaggctggtctcaaactcctgacctcaaatgatccgcccacctcagcctccaaaagtgctgggattacaggcatgagccaccatgcccggcctcactagttcctgttctgagtacaagtgttaattcatttagttctcacaaccctttaaggtaagttcttatacccattttacagatgaggaaactgtggcccagagaggtcaaggaacttgttaaggaacagccagagtgtgacagagtaaggatttaaactaacgcagtccatgataatctctccattcctttgcttttctaaatgctttatataaaccatctctgcctgagctggtgacagtgtcagggtagattcggaaaacaccctgcttttgaccctcagcacactttggggactctcctttcactgtctatgcccagctagactgtagacctgctgagggcaggtctgtgtctctctgagttaatggtgcatcccctgtgcctagtactgagcctggtatacctggtgctcctcagctgttggggcagtgaatgctgagtaagttgaggcactattaaccccaccacatgcttcagaaactgatgctcagagacattgacttggtcaagaacacacggctgtgagttatagccaacatgagcctgtggctttctacctccaggttctacactagacatataccacttattctttttattcctcctcgccttctttgtggtggtgagatcacttattctttgcagtgactgcatttatcactaaaatggagttgctataaccgatgggcatttaggttcttgataatctttcactcttacagacagctgtaatgaaaccttcgtccttagctttgctcacttcttgaagcatttctaaagcccaaatccctagattgaaatcactgggtctacacattttaagtgttttttgttttgtttcgttttgtttttgagagggagtctcactctatttctcaggctggagtgcagcggcacgatctcggctcactgccacctctgcctcctgggttcaagtgattctcctgcctcagcctcccaagtagttgggattacaggcgcacggcaccacgcccggctaatttttgtatttttagtagagacagggcttcaccatattggccaggctggtctcaaactcctgatctcaggtgatctgcccacctcggcctcccacagtgctgggattacaggcatgagccaccgcgcctggcctactactagtgagaggtgacagcgtgctggcagtcctcacagcccttgctcgctctcggcgcctcctctgcctgggctcccactttggcggcacttgaggagcccttcagcccaccgctgcactgtgggagcccctttctgggctggctaaggcgggagccggctccctcagcttgcagggaggtgtggaccgagaggagcgagcgggaacctgggctgcgcgcggcgcttgcgggctagctggagttccgggagggcgtgggcttggcgggccccgcactcggaacagccggccggccctgccggacccgggcaataagaggcttagcacccaggccagcggctgcggagggtgtactgggtcccccagcagtgccagcccaccggcgctgcgctcgatttctcaccgggccttagctgccttcccgcggagcagggctcgggacctgcagccctgccatgcctgagcctcccacctcctccatgggctcctgtgcggcccgagcctccccgatgagcgccgccccctactccacggcgcccagtcccatcgaccacccaagggctgaggagtgcgggcgcatggcgtgggactggcaggcagctccacctgcagccccggtgcgggatccactgggtaaagccacctgggctcctgagtctggtggggacgtggagaacctttatgtctagctcagggattgtaaatacaccaatcggcactctgtatctagctcaaggtgtgtaaacacaccaatcagcaccctgtgtctagctcagggtttgtgaacgcaccaatcgacactctgtatctagctactctggtggggccttggagaacctttgtgttgatactctgtatctaactaatctggtggggacgtggagaacctttgggtctagctcagggattgtaaacgcaccaatcggcgtcctgtcaaaacagaccactaggctctacccatcagcaggatgtgggtggggccagataagagaataaaagcaggctgcccgatccagcagtggcaacccgcttgggtccctttccacactgcggaagctttgttctttcactctgcaataaatcttgctgctactcactctttgggtccacactgcttttatgagctgtaacactcaccccgaaagtctgcagcttcactcctgaagccagcgagaccacaagcccaccaggaggaacgaacaactccagacaagccgccttaagagctgtaacagtcaccgcgaaggtctgcagcttcactcctgagccagagacatcacgaacccaccagaaggaagaaactccgaacatatctgaacatcagaaggaacaaactccagacgcaccaccttaagagctgtaacactcaccgcgagggtccgcggcttcattctttaagtcagtgagaccaagaacccaccaattacggacacgctaggttgctatctaaacaggtgcgaccagcttacctcccttctcctaaggtatgagaatccctgttttctgtactgtgtgtgttcaactttaaaactccccagagactgtattcgaggtttctgggacagtttctaaaggtgtttaaactgtaaaggatttctcctaacagaacctaccttcttgacagctctcaaaaatgtttttatttttgagactttttaaaagagctggccaggcacagtagcgcactgctgtaatcccagcactttgggaggccaaggtgggtggatcacctgaggtcaggggttcgagaccagcctggccaacatggtgaaatcccgtctctactaaaaatacaaaaattagctaggcatggtggcgcacgcctgtaatcccagctacgtgggaggctgaggcatgagcactgcttgaagccagaaggtggaggttgcagtgacccgacactagcaactgcactctagcttgggtaagacaagactatgtctcaaataaataaataaatattacaaataaataagacctctgcagtttattcctctgggaattaggtccagctccccatgtccattaaacctatgtgaacatgcgcaaccaggcctgaactacatttgtgtgttgatgtagagaaaaaggaggcagggctgcaacaaagtccacccagaggtctgcttcccccatcattcaccaagaaaccagctgccacaacagctctgagtgggagtttcttttcatgttgtttccaaaaataaaagccatagtcagcttgggaagaacttttcatcaagcagaacagagaaacagtagaaaagattcaaagagttggtgagattatccagtccaaccccatcgtttattacaggaggaaattgaaacccagagatgttgagtgactagttcaaggtcacacaaaagagtggaaaaaccagcagcagaacccacctcaaagccaggtgctctaacttccagctgagcatcttagtccattttgtgctgctataacacaagaccacagactgggtaacttataaagaacagtgacttcttacagttctagaggctgggaagtccaagatcaaagggctggcatctggctagggccttcttgctacatcatcctatagtggaaggcaaaagggccaaagattttgggggctaggggacaaactcatcctttataaagatgctcctctcatggtaacaaacccactccccaaatactggcattaacccattcatgaggccagaggcctcataacctgattacctcttaatggtcccacctcaatgctgttgcattggggattaagtttccaagacatgaactttggaaaatatattcaaaccacagcactgagtgctctttatgttacagcagggagtatctatgatctccactcacagtcctttaaggctaacttccttccaatctcagttgcttttaaaaatgacaggaaagtgaggcttcttgaaaatggatgtccgcataaaaatcatggtaacatatctatgagcctttgtgtgtgctgtccccactgccttggattcccttctctgcctaactgcttgaactcctcctcatccatcaaaacccaaagaattgctgccttctttgaaaatattccctgactctccagggcctctggttgttccctgctttatgttcttggccctgaccttgccccagcactcagaaccctttatggcaggattggttcttctccatgagagtgaaaactcttccaaggcagagatggaccaaattcatctttgcaacaccagcacacagcttaagctacaaaaggatggactttgaaccacaatctccacgcggaggggagtttatcattccaccccagctcccagctcacagtgtgagcccaagaagggtttgttgctgccaaaggaatctgaacagggaagttctgcaacaggaggggattctgatcctggagccacggagctttcaacagacacttcctggacgtgccaagcaggtcaggctgacaaacgagtgggcactaaaaggcacaagaagctctcacatgtgtacaggcctccaggactacaaagcacttgcaaaggtgacctcatctgagtaaactttgaaagtgctcttcagtgttgcttctgtgaggcctacttcactttttaccaagagaactgctcccaagtctggctgatcctgacctcaggactgtaagacatgaaggtggcacacagggaaggagtaagtcaagctaataaatacatgtctgaacatgcatttatattacaagacatacggggaaaaacaggagcaactctagccataaaataacccgtatatgacaagttaaattgagaaagaattacctactttcacgaagtgcgctgaggtttattgggctctgcgcttccttaagagtattagaaaagaacacacaaaatgctgaaatatgggatttcattatctcagtttactttaatttgcttgtttacacacacgatctgtgtgtacataacagtggcaagagccattctctaaatacaatctggtacccagactatgacagatgcacgtggaaaatgaggcgtcagtgaattaatctcaacatagaaaggcaaaataagcatggcagtattctatgatcacagatgcccccagagcctgggggtaaccgacacttttcaacataatacaggacaattttaacaaaagacccagactccaaatggcacccaaaatatattcgtttctctgccttctctagaggagtcagaaagttctaaaggcttactcaagaaaaaggaggcagggagactatggcctgctaagcacagatgctgagcactttacatgcaccatttctcttcatctccacctgacagacgatgaaaacgaggtttgccatgatcacacagctatcaggagtggtgccaagatatgaacccacatctcatgtttgcttgagcccaaatcctttcacttatgtcaggctgtttcacataggaatagaaagcatgctcccaaggaagaggcaagggggctaagcatggacaagtggcggaagcctcatcgatacagaaggctctgcaattgacactttccacatacagttaatttagtgctgagcccgcatcagacccacgtgggataaatatctggagatttaagtgtcacaaatgaacttctggggtcaccctgtgcctattcccttttggtgctgaacatgacactttggagagccttttttttttttgagacagagtctcactctgtcgctcaggctggagtgcagtggcgtgatcctagctcactgcaacctctgcctcctgggttcaagcgattctcctgccccagcctcccgagtagctgggattacaggcgtgtaccaccacacctggctaatttttgtatttttagtcgagacggggttttatcatgttggctaggctggcccaacctcaagtgatcctcccatctcagcctcccaaagtgctaggattacaggtgtgagccaccatgcctagcctaggagagctttcaatcccttcaacaagcccctgccatctactccatggccactcccaccactggtttatgggcataggcaacagagggtcacatcttaccaacgcctccaaagcaccatggtgccacctcccatatctcatcacctgtgtttctgctccttttgggtgcaacaaatcatgactcattgtgatggataaaattaacctccaacttgatgggatatgaaatatttaaaatatatccttatagtaaaagattttacaccgaagattcatcctcaaccacttaagcttcagtgaagccagtcaggtgtagtgcttctcagttaatgctactattggacttgattggagagaggggcatcaaggcggccttaagggtgattaccccaacagcaaggggctcagtttgaaaggcttaaggagacagtctgggagagaagaggggatatcttatcacagggcgtggaactgtgcctttgtggatggaggtgacaggatttctaacccttcccagcattgtcacagcaaaggccacagaatgacaaagctggaaactgaaaagtgctgcaaaggggagagaaaaaggaaactgatttcaagtccagctgaacaggcccaggtatggtttggtttagtttggttggtgatgcaagtaacaggagggagggaccacagccatgccacccttcaataagggtgattttgcaaacaggttggctttttgccatcagagggaggcattttacttcacttctgaattatcataatcttgtccaacaggtacagatgccctgggccacagcagagtgatcagtgcactcagcacatgaccctgaagcacactgttcagtctataccactgatatgtggtcagggacatttcggtgcaagaacgcattctgcaaaattaccttgattcaccttaaaattcaacaggctgttactaaaatgcctgctttctggtttgattatcttatttatttatagaaaccagggtctcactatgttgcccaggctggtctcaaactcctgggatccagtaatcctcccacctcagcctcccaaagtgccaggattataggtgtgagccactacacctggcccaggtttcattgctaacagagaaaacagccccatgaggtggaatttaagactgtaagaccagagtttggttcataacaagtacattagtgttctaaaccaaccaaccaatcaaccagccaaccaaccaaccaacaaaccctcaaaacaacctacatgtgccagagtgcagcactggccttgtgagttattttcaggagttttatcaacaaagaacaaatgtcacagttcttatcaaaaactgtaaaggattcgctcaaaatagaacagaaaaaaagtaatcttattgctccaaaaaaaccagcatatagtaatagaaaacatggacagaaaatgatcatagtccattacgtatgaatcatccaatacttggtcggagaggcactgcatctaaaagggcctgttttggtggctaatcgcaagtcagttgcaatatttaaacacttcatggatgaaacaaatattacaaccagagagtgtccttcaggcatcaggctgtttttataaagaaccctgcctgagccgggcgcggtggctcatgcctgtaatcccagcactttgggaggccgaggcaggtggatcacctgcggtcaggagtttgagaccagcctgaccaacatggagaaaccccatctctactaaaaatacaaaattagcctggtgtggtgacgcatgcctgtaatcccagctactcgggaggctgaggcaggagaatcgcttgaacctgggaggtggaggttgcggtgagccgagatcgggccattgcaccccagcctgggcaacaagagcaaaactccatctcaaaaaaaagaaaaaaaccctgcctgaaatagatgcctatgcaaaactgaccagtgggaaatactgttttgttttgttttttcttttttgaggtggagtctgctctgtcacccaggctggagtgcagtggtgcgatctcagctcactgcaacctccacctcctaggtccaagcaattctcctgcctcagcctcctgagtagctgggattacaggcatgtgccaccacacccagctaatttttgtatttttagaagagacgaggttcgccatgttggacaggctggtctcgaactcccaatctcaggtgatccgcctgcctcggcctcccaaagtgcagggattagaggtgtgaaccaccatgcctggctggaaaatactgttaagtaacagcagtaagagccgtgaaaatctaaagacaactggaaccagggagaaggcagcaaaggagtcccaaggctctggccactcctttagccacaccataaaggctttcctgattctgcccttttgctgagccttaggtccccactctagggacaaaaggagtgttccagataaaggtcaagtcttaccagggacaaaaagtgcctaactgggaatggtggtgcttgcaacactggtgatgtcgccaagaatagtctgaagactaaactcactccccagacttcagcaccacccaccaaaactgcctggtacactttccctctgaagtaggatcaataatttagccaaataactaagcaaaatatatatttgaaaaatagattagccattgtccttctgtcccccctctgttactcttttatttcttgtaactatcttgcttcaaattcaaactacagctctggggaggaagtcctggggaaaaggctttcggataccaaaacccgtatgtcccgtaccagctcagcaaaccaaacaaggtgccaaacaccttctgggacaagttgtggaaataaacagctgtgcacagaaacatcaacacccagatgaaagtcagaatgcccagggccacaaccagggtggtgatggcggtgtggaggcagtggcttcggtccgtcttcacctcatgcagcacagacatctcttctacaatcatgagggcgcagaaggtcagcaggaaggagtgacctgagatgtcaaagccatgccaaaagcccccttcctggtggcactgctgcttgctctggtgttcctttctgaccccctccagggctggggactggtagcagctgcccgtgtagtgttcgatgttggagaagatggaggtgcagatgtaccagatggccgtgcccacaagcagggtgctcagccgccgcaggaccaagccagccttgccggtcagatggtagttggtgagggcaatgaaaggcagaaggagacagaacgtccaggcccaggccactttgacaaaatacctgacagaggaggaaagtggaagtgaagagagggaacacggtggagaggacaccatgtcaggactcaggtctctacactgtcaggggagggaaaatgagaaaactgatcaaagctacagctcatagcaactatcatgttttaggtacttaccatatacttcacttactaagtactttatttatttatttatttatttatttttgagacagagtctcgctctgtcactcgggctggagtgcagtggcgcaatctcagctcactgcaacctccgcctcccgggttcaagcaatcctcctgcctcagcctcccaagtagctgggattacaggtgcgcatcaccccgcctggctaatttttgtatttttagtagagagggggttttaccatgttggccaggctggtctcgaactcctggcctcaaatgctccggccaccttggcctcccaaagtcctgggattacaggcatgagccactgtgcccagccctcccctcctcccctaccccacccctgtgtaagtactttaaatgtattaaccaggtaatccattaacaactctatgagttggccgggcgcggtggctcacgcctgtaatcccagcagtttgggaggccgaggtgggcagatcacgaggtcaggagatcgagaccatcctggctaacatggtgaaaccctgtctctaccaaaaatacaaaaaattagccaggcgtggtggcgggcgcctgtagtcccaactactcgggaggctgaggcaggagaatggcatgaacccgggaggcggagcttgcagtgagccgagattgtgccactgcactccagcctgggcgatagagcgagactccatctcaaaaacaaaacaaaacaaacgaaaaaaaacaactctatgagttaagtactgttaatatctgcctttaacagagaagaaaactgagacagagggaagtgccacaccaaaagtggaggccagaagcggaggagccaggattcaaatccaggatctgtcgtcttaagcactatgttatttacttaggaaaataatataaataaataataataactgagcatttaccaaatgccaggagctttcacacacattcactttcccatagagcactcacatttaccctgggaggaaggtgccattgttccattttatagacaagaaatctaaggctcagaaaagttcagtaccttgccagggtcacactcacacaaccagcatgaacagattaaaccacggtttggatagcccccagactcatgctgtttctcccataccatatgtggttttttattttttatttttatttttctgagacaggatctcactctgtcccccaggcttgcgtgcagtggcacaatcacacctcactgcagcctcaaactcctgggctcaagcaatcctcctgcctcagcctcacaaatagctgggattacaggtgtgtaccaatgtgcctggctaattttttttaattattatttttgtggagatggggccttgctatgttgcccccactggtcttgaactccaggcctcaagcaattatcctgcctcagcctcccaaagtgctgggattatagatatgagccatgcacctggcctggttctttcctaatggcagaaacagtcttacaacaatgagctttactttaagccaaagacacgggttcaactcttgactctgacttaacttattatacctcctacctctccagccctcagtttcttcagctattaaacagagctggggggaccaaatgatttttttttttttgagacagagttttcactcttattacccaggagtgcagtggcacgatctcggctcactgcaacctccgcctcccgggttcaagcaattctcctgcctcagcctccggagtagctgggattacaggcacctaccaccacactcggctaatttttgtatttttatttttatttatttatttattttgagacaaagtctcactctgccatccaggctggaatgcagtggcatgatctcagctcactgcaacctccgcctcccaggttcaagtgattctcttgcctcagcctcctcagtagttggaattacaggcacgcaccaccacgccaggctaatttttgtatttttagtagagatggggtttcaccacgttggccaggctggtcttgaactcctgacctcaagtgatccacctgccttggcctcccaaagtgcctggattacaggtgtgagccactgcgcccagcctggttctttcctaacggcagaaacagtcttgcaacaaggtcttactttaagccaaaagaccggggttcaaatcttcactcttacgggttcaaatcttcactcttacttaacttactatacctcctacctttccaggcctcagtttcttcagctatcaaacagagctgagaggaccaaatgatttttaaggtcccttctatatcccaggattcactagttccctctcattaatcagcacagaggcttggaacaaaactccaggatccatgactaccttcaaacaacaggggtgtgttgtcagccaggccacttggctcccagctcacctaggccagaggaagcagcagctgccttgtccgcctccccagcgttcacgaaaggtggctgacctaaacccaggacagagacttggggccactaccactctcatgatctattcttagcccagcctctcagggtgggtgaggaaggaaggtggaccaaggacagaaggacttttttctaggttccaatggattctcaggcaccacccccaggcctgtcactaaaatcttcactgggactgataaggaagatcttgccagagccaagacccgtcaggcatttgaggaagctgcctgtgaaaggaaccagggttttaagcagataaccaaagttgggctgactttcaggacacgccagagacacttattctggaaaacacttaggctcacatcaagggagcagttttatctttcagagtttccctttatgaccgcaacagagtttttgtgcaataaacttactaaccgggagttttgaaaaaagcaagtaagcaagcaaaggagtggatgggtggagttaaggagatgtctcaaagcgcccagctgggattgcttttctgggccactgccatgcattctgagtggctgagatgatccaaggagatccaggggaaagggcacagactagggggttccagccctctgtgagtatctcacaggcgggggctctgcctgtcacaggctggggcgaggctcttccacaggtcgtaaagggattctgtcacgcgctggagggatctgatctgacgcagggtggggtctgcgcggggtctgccacaggcaggcaggacagaggtgagatggcatctcccaaacagggcaggggtcagctcctaactccaaggggaggcgggggagtggtgacaggggctggttcatccccaccccattccacacccctacatatacagagacacacacgaccccgcttgtcaccacctgcccagtcaagctcatgctgcccaaagtgggtctgcaaacactaactgctagtgacaccagctaccccggggcctcccaggcgtgacacgcgtgcagatgctgctgtcacggctaggaggaggacctcccctccaatgactcgtccaccacggcagctagcaccggcttctctgggcgaggcgacagcgggccggctcgggcggggacagcggaggaccggggtgcactcacacgttgaggacgttgcgcttgttgctgaggtagctctcgggcaacggggacaactccttgaggagggagcccgccagcatggaggccaccagggcccagggcaggtagcgccgcacggccgcccgcaccagcgtcccccgcaacaaccactcgcagcgctccagatgctccatgccggatctcgtcagccaccgtcctcctctccgtgccctctcggccaccgtatcgcccttcgcccggacctgcgcctccacctcccttcgagcgcatgcgcactgcccgcgagtcccacagcttgaggcgtgcttgggctccggagcccgcgcgctccccctcgtggccgctgctgcctctggcgcgtgacggtccccgaactcgctcgtctcctctgcgctctcctggccgcctcctctccccgagcctccgcgtcttgctctggtctgggaaaaagcgcttgtgaaagtatttgctggaggctggaagaggataaatgtagccctggagaattggagcagtagtcacagcatcatttgatctttcttggagcctcggagacacctctgccatctgagtcttagttttctcatctgtaaaatgcgagagacaagaggagatcaacctttcccaaaagctagtttatgagctcaggggttcattacgttggcacacgtagagggacatgagatgaagtttccttaggaataattattgtatttatttatttattagttagttgggggggggtccctctctgtcgcccaggctggagtgcaatggcaccgtcgcagctcaccgcaacctcaaatttctggtctcaagcaatactcccacctcagcctcccgagtagctgggaccacaggcgggcaccaccacacctggctaattttttttatttttatttctgtagagacagggttttgcttcgttgtcgaggctggtctcaaactcctgggctcaagcgatcctcctgcctcggcttcctaaaatgctgcaattacaagtgtgagccaccacgctctgcagttattaaattaattaattaatataattaatttatttagagacatagtctcgctctgttgcccaggctggaatgcagtggcgcgatctcagctcactgcaggcctctgcctcccaggttcaagcgattctcctgcctcagcctcccgagtagctgggattacaggcacgcaccaccacacccagctaatttttgtatttttagtagagatggggtttcaccatgtcggccaggctgaccaactcctgtcctcaagtgatctgacctctccaaatcttaacctcaagtgatctgccagccttcacctcccaaagtgctgagattacaggagtgagccatctcacctggtgcaattattacatttaaagtttaaatttctaaatttattttcacctgggcaacacagtgagactcagtatctataagaaataattttaaaaactagctgacttggtggctcaggcctgtggtcccagctactcaggaggctgaggtgggaggattgcttgagcccaggaatttgaggttgcagtgagctgtgatggtcccattgcactccagcctgggccacggagcgagaccgtcttaaaaagcacacaaagaaacacaaaacagctatctatgcctgttggatgaaaatgctggatgctgggggttaatggggagatcacatgaagttgttggagactcagttgctcagtttatcacaaaactaacccctcacccctggttagggctgggtgtctatttcagttcccaaccttggactcattcccttaccccaatgttagtttcctgtggcagctctaataaattactataaactcagtttatttttattcctttttttttctttagttttaaatagagatggggtctcactatgttgcccaggttgatctcgaacgcctgggctccagtgatcctcctgcctcggcctcccaaagtgctaggattacaggtgcgagccaccgtgcccaaccctaaacttgttttaaacaacagaagtttattccaaaagccacaaacccagccaatacacacatatatagtcatatcaagagatgggcattttaggccagacgtggtggctcacgcctgtaatcccagcactttgggaggccaagctattttgatcttggctcactgtaacctctgcctcccgggttcaaggtagtctcctgcctcaccctcccaagcagctgggactacaggcacatgccaccacacctggctaatttttttgtatttttagacagggtttcgccatgttgaccaggctggtctccaactcctagcctcaagtgatcttcctgcctctgcctctcaaagtgctgggattacaggcgtgagccaccacacccggcccaaagaaaaatttctatcgaaatattcatcatcactagctgcccaaaataattttgtgtctctataccaaggacagctaccacactgggaaatgttagcctgatttatgcctacaatggactaatgtttatagtctcatgcagagaatcaacaaattaatgaaaataataattccttaaaaccatcttaagatgaccttcatatctgtaaattgcatttatctgattagagttcttatatagcaagatgcttccaggccttcagaatgcttggtttaaaaaataaaatatagtgataattataccaatttggcatttcatgattgggaataaaaactacatagccagaaaggggttatttatgaaggcagcttgtaaatagtatctgataccatctctgtctccttgagtttgtcaggtgctcaattactgtggctttccttagcaaacagcataagaattaagagcagggatgctgggtttgagtgccggttctcctccttattagctgtgtggttcctccaaagaaaatccagatacgtcccccaacccaagaaggagggaaagactgctcggtgaatataaacactaaatatcaccccgagggactgtccaaagagtaccttctgaaaggttcaggatttgtatttttgagaaaggaaatgggtttgtttcctttgaaactgcagtttcattcctggagagttttctttccctccctcccttccttccttccttccattttctcttttctttttttctttttctttttttttttttttttgagacaggatcttgctctgcactcccaggctggagggcagtggtgcgatcatagctcactgtagccttgaactcctggcctcaagcaatcctcctgcctcagcatccaaagtgctgggattacaggcatgagccaccacgcttggccaccatggctggagatttttgaagactgggttaaactcaacctgaaaaaattgttgcaggtctctagagaagtttttgtatttaaaaaaaaattgaatcagtattgggaaatacatatttatgttgtgagtgaaatgatgtgctgtagtcaactcataccagcctgcaagagctgatgattaaattttcagaacttttgcggggtgattgtcaaacacagccatattaagaactgcattatagggcctgggcctgttggctcacccctgtaatcccagcactttgggaggccaagacaggtgaatcgcttaagcccaggagttccagaccagcctgggtaacatagggagatcccatctctacaaaaaatacgaaaattagccaaacatggtggtgtgtgcctgcagtcccagctactcaggaggctgaggtgggaggatggcttgagcccaggagactgaggctgcagtaagctgtgatcatgccactgctctccagcctgagtaacagagcaaaatcctctctcaaaaaaaaaaaaagttacatatataaaaaaacaaactgaaaatactcaaaactcattagttactaattattttactatgttttattattatctatgctcttggggtaacttacatctattgttcctgtatggtaagctcctgcacaactcttcccaaatctattcagtgatgtcacattgagagcttgaaatcagccacagggggagtatttacactatggaaattggcaggtgctacaaatcagggatttatttggtttgtctacattgagagtcaactccatttgtcaaaacatggttgaattgaaaccacaggttgcctatggttacaagaatccaacaaaaatcaataaaagcattctgtgagaatcaattagctatagttataacaaagagtatttatatatttcttttctttctttcttttttttttttttaagacaagttctcactctgttgcccaggctggagtgcagtggtgtgattatggctcactgcagccttaatctcctgggctcaagtgatcctcccacctcagcatcccgagtagctgggactacaggcggactaaatcagccatcacctctagctaatttttgtacattttttggtacagatgtggttttgccatgttgcccaggctggtctcaaactcctgggctcaagcaatctgcacatctcaacctcctaaagtgctgggattacaggtgtaagccaccaagcctggccatatattttattatttgtaaataatgtgctacacattaagaaacatttataataaacataggtaggtatatgcttatacatgtttccctagagagccaatagtaaacctttattttattttattttttatttttttgagacagagtcttgctttgtctcccaggctggagcgcagtggcacgatctcggctcaccgcaacctccacctcccaggttcaagcgattctcctgcctcagcctcctaagtagctgggattacagacatgcatcaccacacctggataatttttgtatttttagtacggatggggttttaccatgttggcaggtgtgagccaccacgcctggccttaatagttaaacttttttttttttttttttttttgagacagagtctgcctctgtcgcccaggctggagtacggtagcggcgatctcggctctctgcaagctccgcctcccgggttcacgccattctcctgcctcagcctctgagcagctgggactacaggcgcctgccaccactcccggctgattttttgtatttttagtagagacggggtttcaccgtgttagccaggatggtctcgatctcctgacctcgtgatctgcccgcctcagcctcccaaagtgctgggattataggcgtgagccaccgcgcccggccaatagttaaacttttatcaacaaatcactggttgtggcctagtacacacataaaaatttatatagtgtataagcaaatatatatgctaataggaatatagaaatagttttatgtctgggcgcggtggctcacgcctgtaatcccagcactttgagaggcagaggcgggcggatcacctgaggtcaggagtttgagaccagcctggccaacatggtaaaaccctgactctactaaaaatacaaaaatgagctgggtgtggtcgcacatgcctgtagtcccagctactcagcaggctgaggcaggagaatcacttgaacccgggaggtggaggttgcagtgagttgagactgcgccactgcactccagtctgggtgacagggtgagactctgtctcaaaaaaaaaagaaaagaaaaaaaagaaaaaggaaaaagaaaaaaagaaatagttttatgacaatttatggcagaattttcctctaccatgtgtgaagtactctgatgttttctactcagaaatttaattcaattttttaaaatgctggtcatgacccactgaaatgattttataacccactaaagggtaagaacctgtagtttggaaaacactgcattaagagagtttgaggcattagaaaacaatgctcctacacttcccaccagaggataatagaagaccacaagtttcagggttctgccctgcctgagacttcagtgggaccacctaattgttggttttcacctttcatttgtctattctacaaatacttattagaagtatatggtatctgcacaaataaatgaaaagatatccagtgttcatggactggaagaattaatattgttaaagtgcccatactgcccaaagcgagctatagattcaatgcaatccctaccaaaatgccaatgtcctttttcatagaaatagaaaaataccttcctaaaattcatatggaaccacaaaaaactcaaatagccaaggcaataatgagtaaaaaaacaaagctggagacatcttactacttgatttaaaactataccacaaaacaacagtaattaaaacagcatagtaatgtcataaaaatagacatagcaaccaatggaacagagtagagagcccagaaatgaacccatgcatatatggtcaattgacttttgacaaagatgccatggatacacaacaggaaaaggacagtctcttcaataaatgatgttggggaaaactggatatccatatgcagaagaatgaaactggatccttatctcacactatggacaaaaatcaactgaaaatggaatagagacttaatataatacaagaaattataaaactactagaagaaaacatatgggaaaagctacgcaacattggtttaggcaaagataatttgaccctgaaagtacaggcaagagaagcaaaaacagacaaaggggattacataaaaataaaaagcaggccaggagcggtggctcacacctgtaatcctagcactttgggaggccaacgcaggtggatcacctgaggtcaggagtttgagaccagccaggccaacatggtgaaaccccgtctctactaaaaatacaaaaattagctgggcatggtgacgggcacctgtaatcctggctactcaggaggccaaggcaggaatatcacttgaacctgggaggcagaggttgcaatgagccgagattgcgccactgcactccagcctgggtgacagagtgaaactctgtataaataaataaatagcttgtgcacaacaaaggaaataattaacagagtaaagagacaatgcacatattgggataaaacatttgcaaaccataagtcttataagggattaatgtccaaaatatagaaagaacttaaacaactctatagaaagaaaacaaataatcttattttaaaatgggcaaatggctgggtgtgggtagcttccacctgtagtctcagctacttggaaggctaaggtggggagatggcttgagccaaggagttcgaggctgtagtgagctatgatcactccactgcactccatcctgggcaacacagtgaaaccctgtctctaaaaaaataagaaaaaagaaaaggcaaaggatctgaatagctatttctcaaaacaagacaacatagaaatggccaacagatatatgaaaaaatgctcatcaacataactaatcattaggaaaatgcaaattaaaaccacaatgcaatatcaccttatacctgttagaatggcaattaggctattataaaaaagacaaaagataagtgttgatgaggatgtgaagaaaagacagcacttgtacactgttggtgggaatataaattagtaccagcattatgaaaaactgtatggaggttcctcaaaaactaaaaacaggattaccatatgatccagcaatcccactctgggtattcacccacaagagttgaaatcagtatgtcaaagagatgcctgcactcccaagtacattgtagcactgttcacaacagccaagttacagaatcagcctaagtgtccatcactgagtggatggatggataaagaaaatgtggtatatatacccactgaaatactattcagcctttaaaaaaggaaagaaattctgtcatctgtggcaatgcaggtggaattggagaacgttatacatatttaaataagctaggcacacaaagacaaataccttgtggacaaagacaatacttatatgtggaatctaaaacaatccaacacggccgggcatggtggctcacgcctgtaatcccaacactttgggaggccgaggcaggcggatcacccgaggtcaggcgttcaagaccagcctgaccaacatggtgaaaccctatctctactaaaaatacaaaaatcagcccggcgtggtggtaggcgcctgtaatcccagctactcaggaggctgaggcaggagaatcgcttgaacctgaactggggaggtggaggttgaagtgatccgagattgtgccactgcactccagcctgggcgacagagcgagactccacctccaaaaaaataaaaaataaaaaataaaacaataaaacaatcgaacacatagaagcaaagaacagaattacggttaccaaaggctagggggtgaagcgggaatgaggagatgatggtaaaagggtacaaagccttagatacacagaaggaataagttgattttttttgagggctattgcatggcatggtgaatatagtgcataatagtgtactgtacatttcaaaatcattaaaagtaaatttcaaatgttcttgctatgaaagatgataagtatttgagataatgaatatgtaaattagcttgatttaatgattccatactgtattcataaatcataacaccactttgtatcccataaatatatacaactataatttgtcaatttacaataaacttttttttttaaaaaaagaagtacatggtctctgacctcaaggaacttaaaatctagtgaaagtgataatcattaagttattcaatcaactaacatttattagctacttactctgcaccaagcattgggctagatgttgggacttctaatgtcttagataggtgagtttctttaataaccgcagatttttcaccctttaggaacatagtttcccaggtttgaggcagaatattcaacatgaggctggatcatcttgtcaaccaaaagcaaggaaatgttaaagcaaataaggagatcattaggctgaggttgtctctgtgcctagagctcttatgtaaacaaaccaaaactgggaggcatttcttgtaactgacataaaaccaaaataaaacaaaacagtctcagtcaatcacaaacagccaaccagctgattggttgtgtaactagggtcttcccatcacaccatacccaaataagacaaatgcctagttgtagccaattaggtgatttctgctttttttttgcttctgtggtcagcctgtaaaagcttgctgctcacacagctagtagagtgaagctctctgaacctcttccagttttgagtgctgcccatttcatgaagcattctttgctcaaagaaagcctgttaaatttattttgtctaaagtttttattttaacagttgccgtaagctctctaagactgctaaggtcaggagaacacaggaatcaatagaaaaccctcccacaggccaaagatgggcaacttgaacataaataataacggcaatgaatggaaacacacaaataggtttaaatccatgggttcacaatggtactttaaaaactaatgcccactttcagaggaaccaactcattattttgaaaactagtaaacaaaagtaaagaatcaagtaatttttttctgtctttcctatgtgaactgaaccactgagcagccaaacagtaggtgagcttctttttatagaaatatctcaataaatggctgggcatggtggctcacacctgtaatcccagcactttgggaggccgaggcgggtggatcacaaggtcaagagttcaagatcagcctggccgacatggtgaaacccctggccaacatggtgaaaccccatctctactaaggatacaaaaatcagccaagcctggtggcacgtgcctgtaattccagctacttgggaggctgaggcaggagaatcacttgaacctcggaggcagaggttgcagtgagccaagttagagccactgcactccagcctgggtgacagagcaagactctgtcgggaaaaaaaaaaaagaaaaaaaaaggaatatctcaataaatgaagaaggaatgatagaattagaatatcaccatatgtaacatgcaagtaaaaatttaagtttgcgatactgagtcacattcactaaagaagagtgagttgcagatactcataaacagaaaaatcttttttttgtttttgtggtttttttgtttgtttgttttgagacagggtcttgctctgtcacccaggctggagtgcagtggtgagatcttggcttactgaaacctccacctcctgggctcaaatgatcctcccaccaccatgtgtcaccatgcttggctaatttttaaagcttttttttttttttttttttttttttttgtagagacaaggtctcactatgctgtccaggctggtctggaactcctaggctcaagcaatcctcttgcccagcctcccaaaatattgggactacaggcacaagacactgcacctggctgagaaaaatttaataaaataaatatcagcagcactttaaatctctaaaaattcaccttataaattttaaattttaaaaatcaaataatcagaattttgacctttgctcagaattttatattttaggcttcttagagttggattttgcagaagcacatggcttcacgtttactgtggaaatgaactataaccaaaaatacatctgcctcaaaaaagcaacattttcttattgccaactgtaatttcaaactccatatatatgtcactgttttggcaagagtagtctctgagtctctcttaggcaaataaaactttttgagtttttaaaaaatcacttttacttgtctttttattttgatggcagtttgagtttttgaaaaacataaaatcactaaatttgtggaattgttacatgaaaatcatctgaggttatgattgtgctttggccaggttggacatttatatatatatataatattatgtattattaatatatgattatatattatatattaattagtatgtgtatatataaagattaaagtaaaaggaaatttaagtttaaaatgcttctcataaagaatttttctctttttttcccttaacccaaaggagtatatcataaagaatttttgggctgggtgtggtggctcacaccagtaaccccagtactttgggaggccaaagtgggaggattgcttgagcctgggaatttgagaccagcctgggcaacacagctagaccacatctcttaaaacaaacaaacaaaaaaaaattaggccaggttcagtagctcatacctgtaacaccaacactttgggaggccgaggcagcagatcacttggggtcaggagtttgagaccagcatggccaacatggtgaaaccccatctccactaaaaatacaaaaattagctgggcgtggtggggcacgcctataggcccagctactcggggggctgaggcacgagaatcccttgaacctgggaggcagaggttgcagtgagctgagatcgcaccactgtactccagcctgggcgacaaagcaagattttgcctcaaaaacaagacaacaacaacaaaaaaatttgtcaaagtggtgtcatatgcctagccatttgggaggctgaggccggaggatcacttgagcctgggcagttgaggctgcagtgagctgtgattgtgccactgaactcttgcgtggaagacaaagtgagaccctgtctcaaaaaaaaaaattgttctttataaccatattaagttaaaatgccagtgattcataaggggattaaattctgctggggtagaatactaaaaaatgagagtgtttatttccattttaaagtaaattggtggccaagcaaagtggctcacgcctgtaatcccagcactttgggaggctgaggtgggcagatcacttgaggtcaggagttcgagaccagcctggccaacacagtgaaacccgatctctactaaaaatacaaaaattagctgggcgtggtggcgtgtgcctgtagtcccagctacttggcaggctgaggcacgagaatcacttgaacctgggaggcagagtttgcagtgagctgagattgcaccactgcactccaggctgggtgacagaccgagactcttgtctcaagaataaaaaatcaagtaagttggttacagggagctatgatttcaccactgcactcctgcctgggcaacggggcaagaccctgtctctaaaatacataaataaacacataaataaataggcttgtgtcacttggttaaatggcaaaatgtaggaggtctttatgggttaggagtatccatcaaagattccatttaaaatatactttataatttacttatttgtgtgtttattttctgtctcccctggaatgtcagctccagagggtaggtaactttatctgtcttgctcattcatgcatcccaagtgtctagaactgtgttctagaagtttgtggttgaataaattaaacaatcattattaacacagtgatctaaaggaaatcattttttcttttttgagatggagtcttgctctgttgcccaggctggagtgcagtggctcaatttcggctcactgcaagctctgcctcccgggttcactccattctcctgcctcagcctcccaagtagctgggactacaggcatctgccaccacacctggctaattttttgtatttttagtagagatggagtttcactgtgttagccaggatggtctcgatctcctgacctcgtgatccacccacctcagcctcccaaagtgctgggattacaggcgtgagctaccgcgcccggccaggaaatcatttttaaatttaaattgcttctttacaactagaagagaaacaatggaaaataataaaaaattatgaaattattattttgagccaggtgtggtggctcacgcctgtaatcccagcactttgggaggctgaggcgggtggatcacgaggtcaggagatcgagaccatcctggctaacacagtgaaactccatctctactaaaaatacaaaaaattagccaggtgtggtggtgggtgcctgtagtcccagctactcgggaggctgaggcaggagaatggcgtgaacccgggaggcggagcttgcagtgatccgagatcgtgccactgcactccagcctgggcaacagagcgagactccgtctcaaaaaaaaaaaaaaaagatattattttggagtgatgcaaagaaaaaaaaaagaaattatcattgttttaatcttaaggagttcccaagattatacatctgtgtgaaagggattttctgctctatcaagtctgaaagatgctgtgataaaatgacaatggtttaagtagagggtgcttggggtcagggaagagttcttggaagggatgatttctgtctaagtcgagatctgaaggattggccagaggaacagtgggaagcagtcattccaggaaaagcaaccagcaggtgcccttgtgttggctgatgtgcatgaaataattcactctgggttgggagtcaggggcagcagcccagtaattctcccagtgggaggccctctttgtccacagctactggccagtgaacaggaggattcatctccagcaccagctccttccttctgagttctcctctgcaatgcctcccccattactaacctctagccacctctccttctgccaggaagggacgactagccactccctggggtgaggcagctgagcacagctggtgtctgccagaggccaggctgcctgactgcccaactgggaagggcttgtctccactgactgttccctgaaacacacacaagcccaggctacccatcacctgggcccatctggggcacagggtcagcagggctggcggctttactcagttgcaggctgagtggcagggggggttcctgggaccctacacatccctggcagtcttgaagaccctccagcttcctcctctggtcactgtctcctgcagactccagtacctcctatcttagacaggtcatggccagggaggagagggaagcttttgttacctgaaagaccaatggtaggtcaggcaaggtggcttatgcttataacccagcactttgggaggctgaggtgggaggatcacttgagcccaggagttccagaccagcctgggcaacagagagaccctatctctacaaaaaaaattttttttaattagctgggctcagccgggtgcagtggctcaagcctgtaatcccaacattttgggaggctgagcagatggatgtcttgaagtcaggagtttgagaccagcctggccaacttggaaaaacccagtctctactaaaaatacaaaaattagccaggtgtggtggtgtgcgcctgtaatcccagctactcgggaggctgaggcacgagaattgattgaacctcagaggcagaagttgcagtgagccaagatcatgccactgcactccagcctggacaacagagtaagactctgtctcaaaaataaaataaaataaaaaacaagctgggcatggtgatgcactcctgtaatcccagctacttgggaggttgaggcaggaggatctcttgagccccagagcttgaggctgcagtgagctgttatcacgccactgcactctaccctgggcaacagagtgaggtggctcaggcctgtaatccagcactttgggaggccgagacgggcggattgcttgagtccagacgttcgagaccagcctgggcaacatacaaaacctcgtctctaccaaaaaatacaaaaattagccaggcatggtggcatgcacttgtagtcccagctactcaggagacaggtgggaggatggcttgaggccaggggttccaggctgcagtgagccgtgatggcaccactgcactcctgcctgggtaacagaataagactctgtctcaaaaataaatacatttttggctgggcacagtggttcacgcctataatcccagcactttgggaagccaaggcgggtgaatcactggaggccaggagtttgagaccagcctggccaacatggtgaaacctcgtctctactaaaaatacaaaaattagccgggcgtggtggcagctgcctgtaatcccagctacttgggaggctaaggcaggagaatcacttgaacctggggcagcagaggctgaagtcagtggagattgcacctctgcaatccagcctgtgcaacagagcaagactctgtctcaaaaaaaacaacaaataaaataaaattacaaaaaataaataaataaatttttaaaataaaataaaataggctgggcatggtggctcacacctgtaatcccaacactttcagaggctgaggcaggatgacttgagctcaggagttcagaccagcctcggcaacatagtgagacccttgtctcaacaaaaagtaaatttttaaaaattagcccgaagtggtggtgtggctgtagtcccagatattgaggaggctgaggcagaaggatcgcaggagttccaggccgcagtgagcaggcctgtgccactgcgctccagcctgggtgacaaggtgagagagaccctgacacaaaacaaaacaaataaaataagataaaataaaataaaaaagatatcttcagctgctcctagtagcttgagagataggtcacgcagtgtcaccatccccatttaacagatgggaaggctggctcagttttgaggccacagaagagcaaggaggccctaagggtctcacaagtcccttcccgcccttaccctgttgaattcttagggtctggcgccaggacacggccgcggggccctaactcccggcccgctcaggaatgtggggcgcccgcgggccggtggcaaggcgcgggggcgcgggggcgggatggggggaggggcgctgacgccgagccttttccgctccagctgcgcgggccggcgacacagcaaattccgagggcacacctggctgtgcagctgtcccgggacgaggatttcccagtcctccggtcgccagccccccggggcacggccttgaccccgggactgcggggccccgcgcggcacaggagctgggggcgccccctggggttaagcgcgctaggccagccctcgccctccccgctgccaaccccaaccccctggcaccgggtgtggaggcagctctgcctctgaaggtggtcccggtccgcgtggccttgccagctccaccttccaggaacctcctccccaccttttcaaagggcgctagtcctttccagcacccaggagggtgagggactccctaactcagcccttgataaccccttacttaatgggagggcaaggatgaggaggggcagctcaggggccctctttggttctgcgttctaggggtccatgggaaatcagtcctaggaagatggactgggatgaggggcccccccttccctgaagggctaggctctccctacctccttcccacccccatcccccaagccccttagggctccaggacccagcacagggcaaggcctccagccctgcaaaaactggcctctgtttacctctgagcccatctctccatccacctcttacactcttgaccctctaggtcctccctaacctgaccttcttcagttcttttttgttgttcttttttgttttaggggcttttttgtttgtttttgttttcgttttgagacaggatcttgccccattgcccaggctggagtgcagtggggtgatctcagctcactgcagcctctgcctcccaggttcaagccgtactcgtgcctcagactcctgagtagctgggaatcacaggtgcgcaccaccactcctggctaatttttttgtatttttagtagagacagggtttccctatgttggccaggctggtcttcaactcctgagctcaggcaatccgcacaccttggcttcccaaagtgctgacagtctttagttcttttttttttttggacacagagtctcactctatcacccaggctggaatgcagtggtgccatctcggctcactgcagcctccgcctcctggattcaagcgattctcctgcctcagcctcccaggtagctgggattacaggtgcaggcaccaccatgcctggctaatttttgtattttctgtagagatggggtttcaccatgttgcccaggctggctggttgccaggtgatccacctgcctcggcctcttaaagtgctgggattacaggcgtgagccaccacaccgggcccttcttcagtttttaaaatgaatctgattccctctagcctcagagggtggacccagtggttccctctccttgctctgccatcttcccccctcctccacattccagcttccggttttcttcatctgacctccacttatttttctgttttctgcttagtcgtcacctgttactaacattgtcatgaacgaagtgttttgaaaatccttgaaccgtagttcttctacaggaaggttagaatcagccctccagcttcctctagaaaccttgttggaattttgattgggattgtatcgaatcatagattaatctggagtaaactgacaacacataggtttaccaaaatgatgacatgagtcagtgacgatacaaattagacataactccttccttcgaagagcttatttatactcttcctattttgttttactttattttattttgtaagagaagatcttattgggtccattttacagatgaagaaactgaggctcgtgagttgatatgactggctctggtcctatggtaaggaaaaggtggggccaagatcccacctatgtctgtttggctcaagaatctgcctattcagtcgattcagtccatgggtttggtttgtgtgtgtgtctgtgtgtttgcaggtagggtatgtttccatgtacccagagtggaaaagcatctctatttaaagatagatggggttgaggtggagtgtaggcgtgtctgctttattggaaggtagcttctatttgcgttggtgtcaaggtcattagcaatgtgtgtagtgttggggggctagtggttatattggggagggtatttatgtgtattgggtaggaagtatgtgttggggggacaagaacaggatatttctgttggtgtgtgtgttttttcttctatataattttacttttatacctgttgaaagtgctcttttaaattgaacaaacggctaggagcagtggctcatgcttgtaatcccagcactttgggaagccaaagcaggaggattgcttgagcctaggagttagataccagcctgggcaacatggcaaaatcccgtctcttaaaaacaaaacaaaaaaaaaaacagatataaaacatgtaaaacacccctgtaggaactccctcatgcctcctctgagccagtaacccccaactcctcgcaaaagcagccactgttctgacttccattaccctaagttaggtttgcctgttcttgagtatcttgtcaatggaatcacacagcatttctctttggcgaggttaatagctgatattgaactaagtttgctctgtgtgctaaaaactttccatatctcactgaatttctcctaatagccgaatcagctagcacctgtttatttatttatttatttattagagacaggcctctgtcacccaggctggagtgcagtggcatgatcacagctcactgtaccctcaacctcctgggctcaagcaatcctccctcttcagcctcctgagtagctagaactatgggcacataccacgaggcctgactaatttttgtacttttttttttttttaagatagagtctcacagtgttgcccaggctgctctcaatctcttaggctcaagtgatcctcccgcctcggcctcccaaagtgctgggattataggtgtaaaccaccatgcctggccagcacctattaattgttcccattttacagatgagcaaatgctcagagaaggcccacgacttgttccaggtcactcaagagttatcagaatccacagctctggtccatgcttattagacggtcctgcctcccttggggtgatctgcagaagaggggcactgctctctgagtgcagagagcagaagacagagcctggagctcagagatgcttctgtgtgtgatttattccccaagtcggtttctcagaatctgttgtgaggcctctccaaccccgccttgctgggtcagggactcagcagcccaaccactgctatgctgtggagactcatcaagctatgggggtcgagtcccagctccgggatttatttgttgtataactttgggcaagttgcctctgtctttgaacctccgtgtcctcaactgttaaaaggaggttaaatttctcctgcttggttaaggggtaacagatggaaggtgtcactgtataaattgctactgttgctattttctttaaaaaaataaaaaactttttatttttaattaaaacacaaatattgaaagtcacataaaacaaacaaggaacctactaggttattatgaggtaaacagcttgtaaccacaggccagatcaagaaatagaagccctgccgggcgcagtggctcacgcctgtaatcccagcactttgggaggataggtgctgggatgggtgccgaggcgggtggatcacaggagctcaggagtttgagaccagcctggccgacatggtgaaaccctgtctctactaaaaatacaaaaaattagctgagcatggtggcgggcacctgtaaccccagctactcaggaggctgaggcagaagaatcgcttgaacctgggaagaggaggttgcagtgagccgagatagtgtcattgcactccagcctgggcagaaagagcaaaactccatctcaaaaaattatatatatatatatatatattttttttttttctccttaaatgccccaccccagcctgcctttatagtatttctttgtttctttacagttttacacccaaatgtatagcctttaagtctatagtaatttgcctcccatcccctttgtttccttacagtttgtcttttgaagaacctggggcattgaattttaagagtttccgcagggctgggcatgttggctcatgcctgtaatcccagcactttgggagcccgaggcagatggatcacctgaggtcaggagttcaagaccaagctgaccaacatggagaaaccctgtctctactaaaaatacaaaaaattacccgggtgtggggcgcatgcctgtaatctcagctgctcgggaggctgaggcaggagaattgcttgaacccgtgaggcggaggttgtggtgagccgagatcgcaccattgcactccagcctgggcaacaaaagcaaaactctgtctcaaaaaaaaaaaaaaaaagagtttcctcagagcctggatcctcgctgctcttttccactcacacacccttctctccggcttcctccctcctcctgcttggatttggagtaacatagatctgggttgcagtcctgagtctacctgttcctgtgtgactttggacaaatcacttaacctctctgaacctctttcctcaactgacaaatgggtacatgacctagatcatctctaagggccttcctgctttctcagtctcctctctcaagcaccaggctcttgccccacagtctcttctcaaaaacaacttttttctttgtttgttttgagacagagtcttgctctgttacccaggctgttgtgcagtggcacaatctcggctcattgcaatctccgcctcctgggttcaagcaattctcgtgcctcagcctcccgagtagctgggactacagacgtcgccaccatgcccagctaatttcttgtattttttggtagagatggggtttcgccatgttgatcaggctggtcttgaactcctggcctcaagtgatccacctgcctcagcctcccaaaatgcttggattacaggcgtgagctaccgcacccagccaaaaacaacttgactgggtgaaaagaacactgggtaagagtcagagagacctggccttggaatctagtttccactggaactagctgtgtgaacttgagcaagttacttaacctctctgagtttccacttccttgtctatagaatggggatcctgaaacccaacccgtgaaactggaatgaggcttacctgaagtcatgtccctaagacatttagtgtctggcatctggtatgtgctacagaaatgttgactgttattgttattagctattattattcattatttattgactgtttgctctgtgccaggcattgtgtcaagtgtcttaagatgtactaactcatttaatcctcacagccatgctatgagatagctgcatcttatagatgaggaaactgaggcacagaagggttaagtaaattgctgatggtcacacagctaaaaagccatggaattgatccatgaacccaggctatctggatgcagagcctgctctatcacccaccaagctgcactgtctcaaatactactactttctggaagaatgttctctttgcttgtccaagcccagagagaattccagtaggggtgaggatggagcagtagctgaattcagttggtcaaatccaagggtgagaaagacgttcttaccctaacgcgagataaatgtccagggcattaacttgagctggcccaagtgcagtggcctacacaggtaatcccagaacttcgggaggccaaggtaagaggattgcttgagcttaggagttccagaccagcctagtcaacatagtgagaccttgtctccactaaacattttaaaaatcagccgcatggtagcacgtgcctatagtcccagctgcttggggaagctgaggcgacaggatcatttgaacctgggagatcgaggctgcactcagtcataatcgtgccactgcaccccagcctggccaacagagcaagaccctgtctcaaaactaaaataaaaatacaaataggccaggcgcagtggctcacacctgtaattccaacactttgggagggagtttgagaccagcctggccaacatggtgaaaccccatctctactaaaaatacaaaaattagccaggccacggttgtgggtgcctgtaatcccagctacttgggagctgaggaaggagaattgcttgaacctgggaggcagaagtttcagtgagatgagattgtgccacggcactccagcctaggcaacaagagtgaaactctatctcaaaataaaataaaataaaaataaataaataaaaataatttgggtcacccctgattatttcctgaccccacccctaatattttacccattgaaaacctgccaaaatgcaactgggaccagctttcttcaatgggggcagcagagagggtctgactgggatgtggctgtgtgtttgctacgagagtgaatttctgtgtttctgtggatgcatgagtgtgtggagtaggcgatggtggtcttgtctgtgtggctggactgtggggtcttcctcgttgtctgtctctcaacactgtggagaggcagtatgggggtgcctgtcccacctctcccacccacaggatgtgtgacccggggcaaatgactcacctctttgtgccttagtttcttcatgtatataaaaatgtggatgatgataataatagggttattctgaagattaaatgagattgcccatgtaatgtgcttaaaacagtgctggccacttatgagaaagtagctaataccatcagcttatatgtagtagacatgcttaagtgtgtaacctgtgggtttctgtatatttatacaggacacctgtggtgtacaatggagaggatatgagggcctggcggggacgagctctctgtgatttgtgggaggggatgtgcttatatgagtgtgtgcacaaacgtgtgtgtgtgtgtgcacatacatgtgttgtgtgtacagcagatgcctgcgccttctgcacatgtgcaaggacgttcactgccaggacccaggttaccacacaaacagtctccatccctaggacaagtcactgaggctcacgtgtgcctcggttccttcatctatacaatgggtggagtcactaccccaaagggagctgtgaggcccaagtgaattgaggatgtgaagttctgagccagtgcaaagtgccagttacataggagtggcttgtgctatgcgttctgagagagccgggcttacttgttgacactcctgggttcctaagtgccatggctgtttgtgtctgccttccctgggctgcagaatttgccctggtgtatcgaagatcccacctgttgttgtccgaagagccagaattgggaacctatcaaagagaaactgggaacagccttcttcagtgggggcagcaatttcagttcagtttcttcagtggggcatccaaggcccaaagaaggataagaacttgccttaagacacccagcacactggaggcagagacggggctagatcgaacgagtctctcttgtccttctggcatagtgggagagcccccataggggtcaggggtcgcagccctcacccctcactgctctgccctccccaccttccccagcatccagcaggaaggtcactgctccagcaggaaggtgtgtgctttggcagccgcactgtctgggctgcctgtggtgggaattccacatgtctggagaggacccgtctggagtagcccagtcccagcccccagccctgcttcgccagctggcccagggtttggcctgctgccccgagactaggttcagcctgggaatcctcagagcttgctagaagagtagtctgaggattgcaaattcttcacctgtgttttttatataacacctttctgttgtaagtctatccccttctattacaaaagtaatgcattttatttttggggaatacaagtaatgaaagaggagaaaattgaactctttcttaacctaggacttcagcaactcagagactgagactttaaacacacacacacacacacacacacacgcacacacgtccattatctacatactcatacattcacctggggacacatttgactcaagaacactcaaacacacacacatgtaagtatacttgcacacacatacacaagtgcatacatactctcacaagtacacacgtacacacaaacacattcacacacacattcctagagtgcacacagtgtgccagccactgtactaaggctccacaaatgttcactcatttcatcttcgcagtaatgctacaaggtaggcaccgctatttctcccattttacagatgaggcacacaatggttgagtaacgtgcccaacacctagttagtgagggggtgggataagggaaatttgaacccagatttgtgggcttaattcatttgctaatgaataggctgtgtttgagtggcatcataacgaacatcaccctaggcttttttccttatgcatctatatttggtttggttagaaaatggcatctttggctgatacaaaaaaattagccaagtatggtggtgcgtgcccgtggccccagctattcaggaggctgagatgggaggatcacctgagcctgggaggtggaggttgcagtgagccgagattgtgccactgcactccagcctggacgacagagcgagactctgtctcaaaagaaaaaaaaagaaagacagcctgtccaatatggtgaaaccccatccctactaaaaaatacaaaaattagccaggtgtggtggtgtgcacctgtagccccagctacttaggaggctgaggcaggagaatcgaggttgcagtgagccgagattgcgccactgcactccagcctgggcgacaaagtgagacaaaaaacagaaagaaaaaaaaaaggaaaggaaaaggaaaaggcatccttttagatactaaccaggcctggggtcagatctggacttaaatcctggcgtgattgcagactggctggcttgactttgggcttgttctttctcctctctggggctcagtttcctcatctatgaaatggggagctatagtacctgcttctgaaggttggctgggcttttgtgtaaagcactcagccctgggcctggcacatagcaggggctcactagatgggccatattaactgtctgctccaaggctggagggtgttatagggaaaacagtcagaaaatactctccagatgcaaggtggccttaatatgtcaggatgtggaaggcagagagaagcctcggggtctgggatctcccataggggatgagtattttttcctggaatccctgccctgttgccacatcactaccctgaccatttgcccagcccagccctacatgcttcaggtgaaagcagagagagaggggcgggagagaaaagcccatcaagcagcaggcggagcctccctgcaggagtctggcctggctggaaggggagggggctgtggggccagggacgtcagatgccaacagcaccaggggaccgttaaagttgctgcgccgccaggtgggccagggtgtctgcagaggtccccggcctcctgggctgccgcctgccaccgcttgggctgcccgtcctgggtacgcaccgttggagcctcctgcctggtctctcgtgcttctctgtctcttctctaagtcgatttttcgctctttcttctgtttgtgcccctctctctgtctatttctgtcctcccccagccacattgttgcctctctctcattctctcttatctctttacctttctatttctcattcttttttctctgtaactctttttttctgtcccctttttggtctctcttttttctctgcctctttcattctctgccattgggttttctctgtgtctcattctcaattcctaaattgcagcaaagcagggacaaaaggaccttgcaatatgacttggggtaaggtgggccctgccctccgagggcattgactgagcccgctccagcaggattggtgaagaggatgtctagactggagagggctgctgtctgtctcctgggctggagggacagagcactggctttgaagtggtggcaccatctcaccccagggccatgtctggattagccactgtctgggcatttcttccccttgcccaacccactcagtcccctggggtggaaaggaaggggtgctgggcatctggaccagagctgcatctggaggtctttgccaagttcccaggaggcagcatcctctgggtcggcactgttggagaacgctcagggtctggtgctctcgtgcctgccccttccaggcagccggctctgattgcacaaggcagacctgtgactcctccatccagctatgcccctgctgcccagcaccgtgggcctggcaggcctgctcttctgggctggccaggcagtgaacgccttgataatgcctaatgctaccccagccccggcccagcccgagagcacggctatgcggctcctgagtggcctggaggtgcccaggtaccgccggaagcgccacatctctgtgagagacatgaatgccttactggattatcacaaccacatccgggccagtgtgtacccacctgccgccaacatggaatacatggtgagtccccgtacctgccccccaccccccgcagtgtcccttccggcaaacgcagccggactcatcttggcctagaatgactggctttgaagagctggaccacttgcctgcctggccccactagccagtatctgggtgtcgacctgtggaaagggcaggagttaatctgcccattttacagatgaggaaaccaagaaggttgcacagctgttccagtgagtcaggcatgtgactactatgtaaggagcaccactgtgcgccaggcactgcacgtgagtatcatctccattttccagaggaagaaactgagactcagagaattaatttgcccagccaggatttcaatccaggtctgcctgctgccacctggcaccatcacaactgtaaccatcacaatcccctacccaagaattttggctccccacactggggacctgcatggggtgcgtggctggtgctttctatgctattgtctctttaccctaaggtcttgactgacacacccacagcatcctccacaagcccctggaggcaggcttggagcagtggggacaggtactggggaatctcaggctgaggaaaaccaacagctgaccagcagaggaagctgggatgtctcccctcaaagaggcagggctggtggctctcactccagcccccaagaagtcaaaggagggcaccaaccttttgcttacagctcctcccccagggccactgtccaaaaccagcctagagggatgggtttccagcccacccagagatgtctttagggaaagagtttgccagtctgccccctgaaagaccaacacatgccactcgatagcctgaaaacttaactttttcatcgtatccattgacttatacttggagtacacttgcagccaggcaccgtgctaagccttgtggatactgctggtaacagaatagacaaggccccttccttcacgaaggtgacattttagtgggaataagagaaaacaagcatgaacaacaagatattaatgtacataagataacgtgaggaggcaatacagtgttgggaggggcgggaataagagccgggatggcaggcagctagagtgcaggggagtcattgacttgttcattcattcgttagcacctagaatgccctccatttttcaaacaaatggcacatttattgagcacccgttgtgcgtgtgtggcacctgccccaacaggtgtttaatgattgcaggcggcatggagcagagagggttcaatatctcaccagggactccagggagggcctgaacatgtaggtttgatgtttagcctgctccttccctcactttacccctttgtagcatgagggaagcactcctctgctctccctaaaagactgagccagagagccgggcgcagtggctcacgccagtaatcccagcactttgggaggccgaggtgggtgaatcacctgaggtcaggagttccagaccagcctggccaacatggtgaaacccagtctgtactaaaaatacaaaaattagctgggtgtggtgatgagcgcctgtaatcccaagctacttgagaggtggaggcaggagaatcgcttgaacctgggaggccgaggttgcagtgagccgagatccagccagcctggatgacaagagtgaaactctatctaaaaaaaaaaaaaaaaaaaaaatattgggccagacaaccctggtagatacctggacccctctttggatgccccatttctccctccctagctgacttctactcacagaacaggctgtccaactcgacagcctttgccctagcagcccttctctcactgccgcaagaaagtttggctcccatttctcactctcacaccgaccaggactgtaataatcaatgacttgttgaaggccttgttgccttgctaccctgagtcctcagtgcctagagatgttgtttgatatttgatgaatgaacaaatcctatttcagagaatcccaggaagtcagagatggaagggaactagtattttaatgacatattttctggttataaaacttggagaattcatacattggaaaattacaaaactgttaaggaggatgaggagggcattcaccatgtagtgatggggaataatcactaagacaaaagagcaaggtgcagaatagaatatgctgccatttgcctatatatatgtgtgtgtgtgtgtgtgtgtgtgtgtctgtgtgtgtgtgtatatatagagagctgcttgtacaggtatagaatatatacctgtatacagaggacacaagaagcagtggtgactgcctcttgggacggtgtgcagggtggtggggttgggggagaagtataggagagagatgagactttctactgttcctccttggttatctatttttgttgttgttgacacggaatctccctctgttgcccaagctggagtgcagtggcacgatctcggctcactacaacctctgcctcctgagttcaagcaattctcgtgcctcagcctcccaagtagctgggaccacaggtacacaccaccatgcctgactaatttttgtattatcattattatttttgaagacagagtttcactgttgttgcccaggatggagtacaatgatatggactcagctcactgcaacctcggtctcccaggttcaagcgattctcctgcctcagcctcccgaatagctgggattataggtgcccgccaccacacccggctaatttttatatttttagtagagacagggtttcaccatgttggccaggttagtctcgacctcctgacctcaggtgatccgcccacctcggcctcccaaagtgctgggattacagatgtgagccaccatgcctggcctaatttttgtatttttagtagagagggggtttctccatgttggccaggatggtctcgaactcctgacctcaagtgatctgcctgcctcagcctcccaaaagtgctgagattacaggcgtgaaccactgtgcccaagcggatatcttacatattaaaattatgcatattttcacgatttaaaaaagcttttgacttaaccattttcaatgttaaaataaacacatttagaaaatactacaaggccgggtgcgatccacctgcttcagcctcccgaagtgccctgtaatcccagcactttgggatgctgaggcaggtgaattgtttgaggccaggagttggagactagcctgggcaacatggcaaaaccctgtctctacaaaaattagccaggtgtggtggcatgcgcctgcagtcccagctactcaggaggctgaggtgggaggatcgcctctcacctcaccacctcccactgtaccaggaggcagaggttgcagtgagctgcgatcgcaccactgcactccagcttgggtgacagagtgagatcctgtctcaaaaaagaaaagaaaagaaaaaaagaaagaaagaaaaagaaaatactataagtacaatttaagaattagttattttctcatccttctgggttcagtcacttctagggactgctgagaactcctgtacgaacaccctgggacctgctcagagcagagcccaagctcagagtcaagagatctgggtgtggaccccagctctggtatggactcatggttgcccttcaagtcatcagcgagctgagcctcagtcttctactttgtcacgtgggtttgttgcagggttccagggagatggggtagaaacggcaccaggtaaatgtgcatctctggacacagttgtgacgatggtggcaattcccctggggaatttcattgcctttctttccccaggtctgggacaagcggctggccagggctgccgaagcctgggccacccagtgcatctgggcacatgggccttcacagctgatgagatacgtgggccagaacctctccatccattctggccagtgagtgaccctctgcccttccttcactcagtcattcaacaaatactcattgaacacttactctgtaccaggtgctgcacttgacactgggatacagtggcgagcaaggcagacaagctctccacctgcagggagcctgcattctagttagaaggggcaggcaaaaccctaacaaagttgtgtatacattgaattgaggcaagtcttgtttggtttgagaacaaacaagtgcacagattgtggtggaaagtgaggagggattggaagactaagaaaataggataagggggccgggcacggtggcttacacctgtaatcccagcactttgggaggctgaggtgggcagatcacttcaggtcagtagttcaagaccagtctggacagcatggtgaaaccccgtctctaccaaaaatacaaaaattagcccagtgtggtggcgcatgcctgtaatcccaagtactcgggaggctgaggcaggagaatcacttgaacctgggaggtggaggttgtggtgagctgaggttgcgccactgcactctagcctgagtgacagagtgagactgtgtctcaaaaataataatgtcaataaaataaaataaagataaggggataaaataaaataaagataagtctgagaatggcaaacccacccttctggcctgaccttctcaccgccattctgactgtcaagtcagattccggggaccttctgatctgggtagccttgggaagttatttccactttctaaaccttggtgtccctgtttgtaaaacaaagttgttagcctagctcagttctttccagacttgtggatttcacaggcctataaaattgcaaaaagaaatctgtgagactgccacacaattgtcagatttttattttgccaaataaggatgtcagaaaaacaactaccttcccatcctcgccattctgccatcaccccggggagagtgggaaagaattaaggccagtcccttcaagtgagctcagtggaaattcagggccctgtctgtgttttttcatgtccttcactggtcacaaccagcaccagcctctgagagccgtgaatggtcactcagagccctacagagcagacatcgggtgattcagtcctgcctccatttcactttccctctcccccgctgctgaactcttcctgccagactccacccctacccatggccaccatttgagaggctcacagagagaaagaaagcagtgttagacacgaagctgtgctgtcgtaaattatgaatgtgcattcttccagattttctccctctttagtcatttatgtatatttttatatatttgtgcccctgtcaaatatgtgtaatagaaaaagccctcagaggccgggtgcggtggctcatgcttgtaatcccagcactttgggaggcagaagcgagcggatcacctaaggtcaggagttcgagaccagcctggccaacatagtgaaacctcatctgtactaaaaatacaaaaattagccaggcgtatgcaggtgcatacctgcagtcccagctacttgggaggctgaggcacaagaattgcttgaacccagaaggcagaagctgtagtgagctgagatcacactgctgcactccagcctgggcaacagagcgagactccatctcaaaaaaaagaaaaagccctcaggtcctcccagatggcttttcagactacagaggttatctctgggtgacacaccagtatctgccttctcctcacatctcagaggcctaggagatcatccgaggagcccttcctttcctaaaaatgcaagctcccccgtctgagatgcacctcctgcccggccctctgtataacagtaacacgtatccttttttgaggacttaccacttgccaggtacagggaggcacttcacatgggttcagaacatgcctgtgaggcagggccactgccctcatgctcacagataggaaactgagatgggggaaaggaagcaaagtgatcacccaaggtcaccagcaagttggcggccgagccacttttccatcctctcacccagcttcttccgtgtcccccgcctccccaggtaccggtccgtagtggatctcatgaagtcctggtctgaggagaagtggcattacttgtttccggccccaagggactgtaacccacactgcccctggcgctgcgatggccccacctgctcccattatacccaggtactcctccgtcagggctgagggcccctgggataacacatcctggcgccttagaagaaaaggaatgtgtggagcagaaataagaatgcaaacaaagaccgttatgagcttcttttcaccaaagaggcatattcctggaaagttgtgtgcacaatgaattgaggtgaatcttttttgtttttgttttttgtttgtttgttttttgagacagagtctcactctgttgccgaggctggagtgtagtggtgagatctcggctcactgtaacctctacctcccaggttcaagtgaaactctgtcccccccgcaaaaaattaaaagttatatatatataaagaaagaaaatgactgggtgcagtggctcacgcttgtaatctcagtaacttgagaggctgagatggcaggatttcctgaacacaggagtttgagagcagcctaggcaacagagaaagacctcatttctaaaaacctttctaaaaatagtgaggtgtggccatgcaaggtggctcacgcctgtaatcccagcactttgggaggccaagggggtggatcacgagatcaggagatcaagaccatcctggctaacacggtgagaccccgtctctactgaaaatacaaaaaattagccaggcttggtggcatgtgcctataatctcagctactcgggaggctgaggcaggacaatcacttgaacccaggaggcagatgttgcagtgagccgagattgcactactgcactccagcctgggcaacagaacgagactccgtctcaaaaaaaaaaaaaaagtgaagcttggtggtgcacacctttagtcccagctacgtgggaggctgaggcaggaggattgcttgagcccaggaggttgaggttgtggtgagctatgatcccaccactgcactccagcctgggtgacagtgagacccacctctctaaaaataataataatttaaaaaggaaatgaatagaaaagtatagaaaatatattggctggccaggtgcagtggctcatgcctgtaatcgtagcactttgggaagccaaggtgggcagatcacctgaggtcaggagttcaagaccagcctggccaacatgatgaaaccccatctctactaaaaatccaaaaaattagctaggtatgctggtggttgcctgtaatcccagctactcgggaggctgaggcaggagaatcacttgaacctgggaggcagaggttgcagtgagccaagataccaccactgcactctagcctgggagaccgcgagactctgtctccaaataaataaataaataaaaacattagtgactgtcaaaaaaaaaaagaaaatatattggctagtctgaaggtagtgagttctctcaattgattgtttacagtcagttacagatccaacttccttctcgcgactgcacttgactgagtgcagtatgaaatgaaagaaagaaaatatatcacacatgataacatgataaggctagtgatttgtaaaactcttgttcaaattgtgtgtatgtgtgtgtctgtttgtacacctgtaacaatataaaaattattccttactgttggttgtaataaaaagaaaacattgagaaacatcatgttacaatataaatgcctccgtttcctcccccaacaccttggaacaggcagactgtctctcccaggaagacctcacctaatgcaactgtacaaccccagggagcctgggtcccactgagcccttctcatagccccctctgtctctgtccttcaccagatggtgtgggcatcctccaatcggctgggctgtgccatccacacctgtagtagcatcagtgtctggggcaacacctggcatcgggcggcatacctggtctgcaactatgccattaagtaagtgcctgcaccaaggcaaagagggccctggggccggcgggtgggtcctgagaattcaaagaaagatacgctccatatcccttcttcattctaagtgccctcaataccatataatttgggtagttttaagagtttactaaggccgagcatggtggctcacgcctgaaatcccagcactttgggaagccaaggtgggcagatcccttgagcccaggagttcaagatcagcctggggaacaaagcaagaccccaactcttaaaaaaaaaaattagctgagtgtcatggtgatcatctgtagtcctagatactgggggaggggtgaggcgggagggtcacttgagcccaggaggttgaggctgcagtgagccattatcatgctcactcatgagtgagaaactgtctcaaaaaaaaagtcaattaataatccattttttctttctttctttcttttttttgagaagaggccttgctctctcagccaggctggaatgcagtggcatgatctcagctcgctgcagcctccacttcccaggttcaagcaattttcctgcctcagcctcccgagtagctgggattacaggcgtctgccaccacgcccagctaattgttgtatttttactagagacaaggtttcgccatgttggccagactggtctcaaacccctaacctcaggtgatctgcccgcatcggcctcccaaagtgctgggattacaggagtgagccactgcgcctggcctattttctcttctttttttgagacaaggtctccctctgttgcccaggctggagtacagtggcacaatcacagctcactacagcctcgactggctgggctcaagtaaccctcctcacttcagcctctcaagtagctgggactacaggtgaatgccaccatgcctcgctaattttttgtagagacggtgtctcactatgttgcccaggctggtcttgaactcctaggctcaagcagtcctccttccaaggtctcccaaagtgctgggattacaggcgtgagccaccctacccagcccaataatccttttcctttacccaagtttgagaatcactgggaaatagacaggattgacacaggtggaaagacagtgttgctgaagtcagtagtggagaatgtggcttacatctgccaatacaccagccaactaggcttacaaatatctcactactgaattagacctacacatccagtggcaggtaacactggatagccaaaggccccttcttagaagtacagtgccagccctctaagcttacgacaagaaaaatacagccaagaacacatgctccctgcaggcaggcagatcccaaagaaaaggaaggaggaatgagtgtgcttagcttctccagtttgctgggtgggagagtttaggagatgcctgcatacaagcctcttggaaacagggagcaagcgtaatgaaacttgcagacgttccagattctcatagaaaaacaagaacaggccaggagcagtgtcttacacctgcaatcccagcactttggggggctgaggcgagtgaatcacctgaggttaggagtttgagaccagcctggccaacatggcaaaacctcgtgtctaccaaaaataccaaaattagctgggcatggtggcgcgtgcctgtaatcccagctacttgggaggctgaggcaggagaatcgcttgagcctcagaagtggaggttgcagcgagctgagatcacaccactgcattccagcctgggcaacagagcaagactccgtctcaaacaacaacaacaacaaaaacaaaacaagaacaaattctaagtaaacatgatatttagaatttctttttttcttttttcttttttttttggggggggacgaggtcttgctctgtcgcccaggctggagtgcaatagccagatcatagctcactgcagcctccaactcctgggttcaagcaatcctcccgcctcaccctcctgagtagctgggagtacaggcatgcaccattacacctggctaatttttaacatttttgtagagatggggggctcattatgttgcctaggctggtcttgaactcctggcctcaagcaatctccctacttggactcccaaagtgctgggattataggtgtgagccacccaccgtgcctgccctagaattccaaaattatataataaccacattttactgtcacatagcctttaatcatttacaaactactttcacactatctcattgaagagatgaaagaaagaaggaaaaaggggggaaccctaggaggacattctttttacaaattaagaaattgaggctcaggcaggttgagtaatttaccaaatgtcacaaagccaacaagtagtagagctggttcagaagaatcagtcttttgattccaaattccaaattctttctattgtattattctgatgttcttgaagtcattagtagcctgaaacaaattctcaaaacaggatacttgttatttgttagaaatggcatctattgacaatgtgtcacgttacagcccagctttatcagagacagaaaaatacaagaaaccaaatttcattacaaatagcgtctaatttttttttttttttttttttttttggaggcagggtcttgctgtgttacctaggctcggaagtacagtggcatggtcacagctcacggcagcctcaacctcccaggctcaagttttctagtttgtttgttgacatatcaaatgtttgaagcattgagtgttatcagtatagttgttaagatttttagcctctggggccaagactaccagggttcaaatgtgtgatcttacttaacttctctactcctgtttcttcatctgcaaaatgggaataaaataatacccaatcttggaattgagtgagataacacaggtaatgcccccaggctcataagtgggaaatacagattggttactattgttattaccaggcctaggtttgattcccctctgcaatgcatctactaagcatttgaatacatcattttatcttgacaggcttcggccttccccttccccttcctttctttccttcccctttccttttccctttttcctttcccttttcccctttctccttttccctttctcctttcctttcctttcctttcctttcctttcctttcttttcttctgtccagctctgtcacccaggctggagtgcagtggcagaatctcagctctgcaacctccacgttcctggttcgagcaatcctcacaccacagcctccccagtagctgggactacaggcgttcaccaccacacctggcttatgttttgttttttgtttttgttttttgtagagacgggggtctcgccatgttgcccaggctagtctggaactcctgggctcaagcaatctgcccacctcagtctcccaaagtgctgggactacaggcacgagccaccaagcccagcccctttaaggtaaatgctacctgctcacagaatttaaggattaaaatataatgtgaggccaggtgtggtggctcacgcctgtaatcccagcactctgagaggccgaggcaagtggatcacctgaggtcaggaggtcgagaccagcctggccaacatagtgaaatcccatctctactaaaagcacaaaaattagtcgggcatggaggtgcgtccctgaggcaggagaatcgcttgaacccgggaggcggagtctgcagtgacctgagatcatgccactgcactctagcctgggcgacaatgcgagactctatctcaaagtaaaataaaataaaataaataaaataaaataaaataaaataaaataaaataaaataaaaatagcctctgtggtgccttgcccatagtacatgctaaataaatggtggccatgactagaaccaagttataaactcttgggcatgggaaatcgaccgttttcatttctatatccttctactatagtgattgcaatcctttgtttttttaagcagaacttttttctaagtggttaaattaaacaaaaaaagaactccatgtcatcccaggtatcaccaccacccactctccccgcccccaaacttctgagagcaccttttgagaactgtggactgacagcagccggcacaaatcctgatgttcaataggtgctccagaagtgtttgttgaatgactaaatgattgaatgagtcctgttaggaaaccagaagtgagtatttttctgagcacttcagctgatttcactcatggtcactcaacaatcacgtttggagaaaaaagattatatttctgctcaaaggtgtgttcatttaaggtgagaaaacaaggcactggggcttggcaaagaatgccacaggccagtggtgagattattaggcagccatgagcaagagctggaggaacaattttaggctttgaaaggagaaagagggagaaaaaggctgggcgcggtggctcacgtctgtaattccagcactttgggaggccaaggtgggcagatcacttgaggtcaggagttcgagaccagcctggccaacatggtgaaaccctgtctgtactaaaaatacaaaaattagccaggtgtggtggcacatgcctataatcccagctactcaggaggctgaggcacgagaattgcttgaacccaggaggcggaggctgcagtgagccaagatcgcaccattgcattccagactgggtgacagagcgagactccctctcagaacaaaacaaacaaaaagaataagaaaatcaacccttacaagggagccactaattaactaggcacagtgctaggtgcatacatacatgtgatctttgctgaattccttagagagagaggaggctcttctcttggttttacaggagaaaccaaggcttacaggttgggcacagtggctcatgactgtaatctcagcactttgggaggctgaggcaggaggactgcttgagtccagaagtttgagaccagcctgagcagtatagggagaccccccatctctgcaaataaataaaaaattagctgggcatggtagcatgtgcctgtagtcttagctactcagaagactgagctgagttgggaggattgcttgagcccaggacgtcaaggctgcagtgagctatgggtgacagagcaaaacaaaataaataaataaataaataaaggaaagaaaaaaaagaaaccaaggcttgcagatgtgacttgccccaggtccccagggctggtcagtggcagcgctgagatctggacatctgtgtgaaggttactcacctaatgctcctctgtctccctgggtccttttctcttccaggggcaactggattggcgagtccccgtacaagatgggaaagccgtgctcctcctgtccccccagttatcaaggcagctgcaatagcaacatgtgcttcaaggggctgaaatccaacaagttcacgtggttctgaattttctctgggctttggtgcgcctccagctgggcctgaccctccatgtcctgccctcaaaaaactgggtggagaaataattgtttctttaaaggatatgagttagaatcaccccctgttgaattttccctcctagatccccttcttaaatgtccaacatgggtcaaaagaaaatgacctccttgccttccttctttcctagttgcatctttcttttcttgggcctctgggaaagagccctgcatctttcattaattcggttctcagagaaccaaggctggaaggcatagaactggcaccttgggaccaggcataatggctcacacctataatcccagtattttgggaggctgaggtgggagaatcacttgagtcctggagttggagaacagcctggaaagcctggcgataccccatctctatttagaaacaaacaaacaaacaaataaaaaacctggcacctcggttttgtaactctcaggctttgtcaaacccaaatgactttgtccatccaatgaaaggaattccactgggtgcggcggctcacaccggtaatcccagcactttgggaggctgaggcaggtggatcacctgaggtcaacagttcgagaccagcctggccaacatggtgaaactctgtctctactaaaaatacaaaaattagccaggagtggtggctcgcgcctataatcgcagctactcgggaggctgaggcaggagaatcgcttgaacctaggaggcggaggttgcagtgaacagagatccagcgactgcattccagcctgaggacagagtgagactctgtctctaaaaaaaaaaaaaaaaagaaagaaagaaaggaaacccgctttcattcgtctcataacagtcaaccagtttctgggcagtctttgaggactcgtgattcgctccctgagttgggcacatttcaggcccatgattttgaaaaacattgaaattggcttgtggacatccgcccccccacccccactgcatggtactggagccacgacagagtccaggcccccctttttacagatgggtacactgaggctcagagcagggtgtaacttacccagagctgcacagcttgtctttgatggccaaggttagagctcagtctctcacagctccttcctgcttcctcggctctcagaactgagaagtgaaaaccaaagttggcctgaggggactctctctgggcctttttttctctatctctgcctcggtctctctctcttttgtctactgtccgttctatctctgcctgtttttgttttggtctctgcatctctgattctttttctcccatataatcttactctcattccaataaaccatttcccctctccccccaccatcccacccagggatcatagcacacaaaagtccttttgtctccagagatagtaaaatctcctccctcagaccttgccctgcagctggggcccactccctgcctggctggagagcttttcctttgaagacccgggatggaaaacaggcccttttccatggagtccctacgttgtcctggatggaatgaattttctcatcctgtgcatgtcaccccctcccattccacccccaataaagtcttttgagatccagtgtagtggctctttctggtccctccctctcttggctcccaagagggtcaaaacacaaggaatgggaactgggtgggggaagatgggtgagaggaaaaccagctcaactggaagaccaggggaaggaactaacagcgctttgggccccgctctgcagaaggctagatcaatgcacaagtgcatgcacgtatactattgctccactttacagatgagataaatgaggcatggggtgagtactagcttccaaatgctggaaatgagtgaaataagagaattaagaggttgggcgtggtggctcatgcctgtaatcccagcactttgggaggccaaggcggcagatagcttgaggccaggagttcaagaccagtctgggcaacacagtgaaaccctgtctctactaaaattacaaaaattagccaagcatggtggggcacgcctgtaatcccagctactcaggaggctgagacaccagaattgcttgaacccaggaagtgaaggttgcggtgagccaagactgcaccactgcactccagcctgggtgacacagcaagtctgtgtctcaaaaaaaaaaaaaaaaagagagagagaattaaggacactgttgtgagttcattgttcttagactatatctttcctactttattttttggaatgggctctcgaaggcagtatcagaaatggaaaaccgaagagatcacgtggaattcccaccttacagtggcacttttggcttgtctcttccctggcacagtggctcatacctgtaatcccagcactttgggaggccaaggaaggtggatcacctgagttcaggagttccagaccagcctgaccaacatggtgaaaccccgtctctactaaaaatacaaaattagccaggcgtggtgctgtgtgcctgtaatcccagctacttgggaggctgaggaaggagaatcgcttgaacccaggaggcggaggttaaagtgagccgagatggcgccattgcactccagcctggacaacaagagcaaaactctgtctcagaaaaaaaaaaaaaaaaaaaagaacagatttaatgaaacttcttgaatcccagtttttacatctgtaaaatgggaatattgacagtgacaattcaatgacgttaagaatatacaatgctgacaaactaaagagttcataaatgccagtggttgtcatcctcattatcctggtgctcaggaaggcaatgtgagacctgttgaaatagcacgggctttggggtcagatgatgctgaattccagttctgtgttggctccttcgtagttatgtgacctcatgacgccacttcatgcagggggttacgtaccacttaaatctccagaacattttgggaaattgacatagggttagcaaacctcccccacccccatataaaaatattaatactttttttttttctgagatggagtctggctctgtcgccaaggctgcagtgcagtagtgcaatcttggctcactgcaacatttgcctcctaggttgaaacgattctcctccttcagcctcccgagtagctgagattacaggtgctcgctgccacacccagctaatttttgtatttttagtagagatgggattacaccgtgttggccagcctggtctcaaactcctgacctcaagtgatccacctgcctcagcctcccaaactgctgggattacaggcatgagccactacacccgaccaagaatattaatacttttttttaaaaaatatcgaagttatttatttatttatttatttatttatttatttatttattttgagatggagtctctctctgttgcccaggctggagtgcagtggcacgatcttggctcactgcaacctctgtccccctggttcaaacgattctcttgcctcagcctcccgtttgccaccatgcccggctaatttttttatttttggtagagacggggtttcaccatgttggtcaggctggcctcaaactcctgacctcgtgatcggtgcgcctcggcctcccaaaatgctggggttacaggcgtgagccactgcacccggccccaaaatctaacgtttgttatcactgttgttttagaaaagaaaggacattttaatgcaacccatgcccatctgtaggggctgaaggtccctctgaggtgattgataaagctgaaaaaagagactatgggaagagaagaggaatattatcaattagctattttagaagcagggcaaactatgagctaggtattcctataaggaaatgaaataatttactaaaaaacatacagcaagaaaataatagagctggagttttctgatttttctgagtccagaatttgtttcactgttctcatttcagctctctctaacaggatgaatgaccttgatttcagaatccccaagcaggtggtgagatccaaaactgagacaaaagaaacggggctgttccaaaaaaaaagctaggtggcaggtgtctaacatgccagggagctaaaacagagtgtgtgagtttcagcagcaggttgaatttagaatggggaaggagaccagaggagacgccagacaggatgactttgtcccattggcctggaggcagccccatgtttctccacccctcatatcactcaccagtttgtaatagtatctttgaatgacgatctgattaaggtccgtctcctccattagtccacaagtttcgggggtacatctactttgctcatttccatatccccagagtctagcacaaggcctggtacatagtaggtgctcaataaatatgttagatgaaaggaagataacacctctatgtactagcagtgagactccaggcatgcaatttctctctgtccttcagtcccttcatctcaaggtttaatttaaatatggtaacgcctgtatgcaactcccagcatccagtaggcactcactaaacacagttctccaccctccttttttcctctgcccctccctcggttttcccactacttcctgcatggtgacacacccatagtttggagccataaaacccaacccaggttggactctcacctctccagccccttctgctccggccctgtcctcaaattggggggctgatgtccccatacacctggctctgggttcccctaaccccagagtgcaggactaggacccgagtggacctcaggtctggccaggtcgccattgccatggagacagcaacagtccccagccgcgggttccctaagtgactggttactctttaacgtatccacccaccttgggtgattagaagaatcaataagataaccgggcggtggcagctggccgcactcaccgccttcctggtggacgggctcctggtggctgtgctgctgctgtgagcgggcccctgctcctccatgcccccagctctccggctgggtgggcttggccatggtcagcgtgaacgcgcccctcggggctccagtggagagttcttacggtaagtggggctgggggaagactggacagggcgggactgcggtcagctttgggaggccatgggacacctccccgtgtgtttcttacgggcccaaagctcctcctggagctcctctggaagggcaggaagccccacggaggcaatgtgaccgcttccctaagctctcaagccggggcatggcctgcttggtgcgagaagtgctgggaggggccgagaagccctggggcagaggcttggctcattttgtctgtccagaggccttcctgggaatgcatctcaggggtctttccaaaaccccacagagggtggggcttggaagcaccgtcctgtttcgatgcggggcaaattgaggtccaccaggagaggcttgctgggcctaggtcacgttgctggtgcattatcaagctgggcgtgggaccgggcagctcggtcgctccgcacctccgttggctctggataatggggaggaggtagaaagcgccgcgcagggtggagcgttggaaaatgagaatatcttgtgcggacgtgtgaaactcagatgcagggctagaaagcatgtgttactgagagtgaaaggctcaggctcactccttagggtgacccccacattggaagcaacccaatgtccctcagcagagggaagacgggtaaataaagcgtgagacgtctttacagtggaatgctatcccattgttcaaggaaacaacgcacatctgtgtgtgacagggaagaacctctcagttaaattaagtgaaaacggtacactgaagaactgtgtagttgctgatagcgaaacggatatagatgtatatatgtacacacgcgtatacgtgtacattccacgcatagaaaattcgtggaatgacacaataaaattggtgacaggtttgtttctgaggagggaaattcaagagaatgttttatcttttggggacacattttggattttttaaaagttgggtgccttttataaacctgttcaaatcacacacccgcacagaacttggtctctggaatccagcagacctcggggtctagttgtgactctgtcacacggctcaacattcacgtgcctcttgctttctttctgaagtggagacaggactaggatgtgtcttaagatcatggtggatgccgtggggaacaaggatgtaaagcccttgataccacgtgcattgcaaagacacaatcaacatttatgtcatcaattgctgaggacagagggccagggaatgacagaatcagggcctgatctcctgactctagtcaggaagaatcttctttgctttgacccccatcaaacaggaatatgtgatgcactggaaatggcagaggctgaagaaaccaacagcctgggaacccatcccacacaccagctgtgtgaccttgggcaagacatttcccctctctgaacctatttcctcatctgtaaaatgaagataacaacaggacctatctcccagagagcggggagattagaggagatagcatagaggagattaagggtgaggccacccttaatccacaattttaagacctggagtatagatgccaatggatgacttggttgaacctgtggctaggggaagacattgtctctcaaaggggccagacagcttctggggaaggacagcccaggtcataaggctaagctaggggtgaacagaaggccccacagtgtctcttaaaggatgatacaataatataacctgacagcctttcactgtctcccacgtctctgcaccttgtaggatgtcctcatgtctcttcatctctgctcctgtgtcatactcattatatagcaaacattcagcaattattagaatggttgcttctatcgacaggtaggtgggtgaatggatggatgaatgggttagtgaatgttctactattatctctcagacagctgtttcattttccaaacggctgtctgagataaataatattgtaatctccaaggacagaagaaaaaactaaggttcaagattaaaaaaaaaacacaaacaaacaaaaaatgtcatctgactcgagacttgacacaatccagctgttgctggccctctgctctaggccacagatatggctggacagagaaaggagaactccagtgaccttgcagtacatccacaaaaaatgagcacttttgtcctggggcagtggaacattcactgcagtgtatgtgtgcctatgtgtatgtgtgtgagagtggctgaaagaccctgatttgatatttttgataaaatacacctgggttagcatcctagatctaccttatttaaaaaaaaaaaacaaaacaaaaaactgtgtggtcttgtgagtcaaatcattacccctctctgagcttcacatgttttatctgtaaaatgagctactgaagtctgctggaaggctccagaaaaaaaaaaaaaagaaaagaaaaatttgctttctgagaaaagaaacaagtgctccgaggaaacaaaacccctctcccaggctgggtgcagtggctcacgcctgtaatcccagcactttgggaggctgaggcgggcagataacttgagattaggagttcgagaccagcctggccaacatggcaaaaccccgtctctactaaaaatacaaaaactagccgggtatgatggcacacgcctgtaattccagctacttgggaggctgaggcatgagactcacttgaacctgggaggtagaggttgcattaagctgagatcatgccactgccactccagcttgggcagcagaacaagactctatctcaaaaaaaacaaaacaaaacaaaaaaacaaaaaacaaacaaaaaatcttcttctggggttctctaatggggataacattaatcatctcctaagatgactatagtagaggtgcattggtgggtcagggacatggcacatagcagagcctcagttagaggcagaggaagacatggctgttgtgaggatcaaatggaaggatccatgagtgcttagaacagtcctgggtccagagcaagcacgcaagaaatcctcgttgtggtttcatgtttttgagctttagcaggattctaaagagctgctctttggtgtggtgatgctgggtggacttggccctccctggacttccggtgcttccacggcacactggttttggctttgcggttctcgtcatcgctctgatcagatagttgctggtgtgaattgtggtgtctggctgccccaccagactataaactccgtgagttctgggacctgggtagtttgttcagccttgtttgtctcactatgtctcacatggtgactggcacagaagaaatgctcaataagcatttgttggatgagtgaaatgatgggcttaaaacagcgctacaatgatgatcatcaatgtcagccagatcccactctcttgccttccttcctctctgccctcctcactgcgttgtctttggtccttgtatttgccccattataacccaaactggctgtcccagcttcagctgtcatgtctgcacttacgtgtctgaagctggaggcaggaggagaagaggttttcctcagtgcccttgtttcttttatccaaaagcaaaacttccccagaaacctcctggcagactcccctagttcaaggaaagctgggaagacaagtatgtagtggaaagagatgggaaagccaagatggacctagaccagtgatttttctcttggggtgtggcacactcctgctccaaacagaactgaggctctggtataaatgagtttctcagcctcagcactgttaactttctggcctggaagattctctgtggtgaggggctgtcctgtgcactgtaggatgttaagcagcatccctggcctttactccccagatgccagtaacatctcttcccatcagttttgccaaagaaaaaatgtctccagaaagccaaatgtaccctggggcacatataaccccactgtgttataggagaacaaggtagttctggggagtgtctaccacaatggagtagagtagactgtgactcttgtgttgttctgctttgagtgccaggatcttgctcagtgccaatctggtactaccctgagtaactctgaggatgagatgctaaacatgcatatctgtgtgctaacctgactcctggccttattacttttctacccttattttccctttaacaagtttcccttggttatttattttgcttctttggtagttgctcatttccgtaagtacctcgaatctccttaaaggaaaggtctgtatctatctcattctttttgttatagtccagccttccacagggcctgatcccatgtagaccttgattgaagattaattaagtggatgaatgaatgggaagatggatggatgaataaatgtatgtttaggtgggtggataggtgaatggactgatgaatgaatgtgatgtgatgaatggatgtgatagatgggtggagggatgcatgaatggaatagagggagaaatagctggatggatgagacaaatgaatgagtaactggggagatggctgggtggatagatgggtggatggattaataaaaagatgttatgggtggatggttgggtgtggaggatgatgcatggatgggtaagtagatggatggaaagatatgtaggtgcatgtgataaatggatgaataagtagctggatagatgggtaggtggttaggggaaggatggatggacaaatgatgtgatgagtgggttgatgaaaagatggatgaatggatggataagaaggggtgggctgaggtagcctggaatagcagcatcttcaagtgctctaaacaggacaagtgaagagataggggatgtcaacaatcttccatcagggcaatactgtatatctgtttttaagtgccaggtgagcctaatttttcctagctatgtaggcctagtccctttgaccaatagcatcagcttgaggacagatcagaggccattgtcggagacagtttggtgatgtggctctgccccttgaagctctatgatgatggtgctttgcttcacttctctggtcctcagtttcttcacccatcaaatgagccttggttgttgtgaagattccatgagctaatgaaagagaaaaggtaatagaagctataacaaacatgccgtgtccttgtgaagggtggataggcccaaaatcgagtaggaccccagatgctggctggctatgggaccgtgtccaatatcaggctatggctgttcccacccttcattcttaaaatatggcccctctccagcccttcccctatctcccctcccacatcaccttcccatcctacgtcaattcagtcttcagcccctatgattcacaaacctggttgcacataggaaactttttaaaacaattttggggctccactccagacccagtgaatcagtctcctggggtgagttccaagagtctgtaattttttgagctccttgtgtgacttagggtatgcagttcagttgaggtatggaaaccattgccttactttctcccatttagtaaacagaggaactaaatatccagagtgcatcttgcctcaacccagaagcctcccgtattcattaattcattgttcatttgttcatttcttcaacaatcttccactggaggcttatggtatttaagacattttgtaaggcactggggaaacacaggaggataaaactttgcttcacgtggtggctcatgcctgtaatcccagcactttgggaggccaaggtgggtggatcacctgaggtcaggagttagagaccaggtagaggcagaggttgcagtgagccaagatcacgccactgcactctagcctggcgacaggagtcagactatgtctcaaaaccaaaccaaaacaaaacaaaaccaaaaaaaaacaacaaaaaaaacaactttgcttcagatcttaaactgtgctcagtttggcaggaggacagacaagccagcagcaaccaaagacagagtgccatgataaggacagcaaaggcactgtgggatacagagggacttaggagaaggggaaggggtcacagacttcttgaccttggaggagtagactgatatctaagctggaacctcggtttagcaggagtcagccgggagaagagacggtggggaagagtgttcccagctgagggaacagcatatgaaaaggcctggagcctggccacacactgctctgattttacttatatttgactgcaattaattccatcctttactgaaagtatcttgagacttgtctggttgtttcatgattgattaatcttattcctaaaagcatgctgaggctgggcatggtggcttattgtggattacacgcctgtaatcccagcactttgggaggctaaggcgggtggatcacttgaggtcaggagttccagaccagcctagtcaacatggtgaaaccctgtctctactaagcatacaaaaattagctggacgtggtgccaggcgcctgtaatcccagctactcgggaggctgaggcaggagaatcacttgaacgcaggtggtggaggttgcagtgagccgaggttgtaccactgcactccaacctgggcaacagagggaaacttgtcttaaaaaaaaaaaaaaaaaaaaaaagcatgctgagatgcttaagtgaaggaattgtgccttccatttttcctgactcatatgcctgtagcataaggatgggtcaatgataacgaaaggaatttgttttcatttaagccccttttatgtaatgggcaagatgttggctatttgatatgttttctcccttttaagccttgcaataacccatccaagtaggaaatattatctccattttataaacaaagaaattgagattcagagttgttaagtcacgtttccctgcatcgccttgcaaataggtgattaaaatctagtctgacaccaaatcttcattctttcagctattatgtcataatagcatccaaggagtttaccaccttctaccacctactagctgtgtgaccttgagtgaatgactcaattctcttttttttttttttttgagacggagtcttgctctgctgcccaggctggagtgcaatggtatgatcctggctcactgcaacctctgcctcctgggttcaaacaattctcctgcctcagcctcctgagtagctgggattgtagctggggttacaagcgcctgccaccatgcctggctaatttttttttatttttagtagagatggggtttcaccatgttcgccaggctagttttgaactcctgacctcaagtgatctgcccgcctcggcctcccaaagtgctgggattacaggcctgagccactgcgcccggccgacccaatcttttttgcctcagtttcctcatctgtcaaatggggttgatgataataccatttacttcacagggttgttgtgagacataaagtcaatatttgtaaagtgctgagtgtctagcacatagaaagtgctatgtgaatttgaacgattattattattatacctatagtgtgtgcatctactatatgcaaaggactggatgcttactaggtgttagcatcattttggctgttgtagaaacaacagagatgagtaaggaatagataactggtcccaggatgcaactgtctctggctggagactaaggacaaggctttgttgcaagccttctggggccctgggatgcccagggtctcctcttgggggtgctggttcatagatgggggcctgtgtggctccttcacagaggaggaggcagatgagaggcatagaaagggaggggacagacctatcctcatcagagacctgggagatggctctggccctggccctgggtagctgtttgtgacctcactcaagtccttctcctgctgtttctccatctactcttttttttttttttttttttttgagacagagtctcaatgtcacccagtggctctatctctgctcactgtaacctccacctcctgggttcaagcaattctcatgcctcagcctcccaagtagctgggattgcacgtgtgtgccaccacacctgacaaatttttgtagtcttggtagagatgggtttcaccatgttggctaggctggactcctggcctcttgtgatcctcccacctcggcctcccaaagtgctgggattacaggtgtaagccacagcacccagcctccatttcctcttttgagaaatggaggtatgacaaccatctggctcagccattgtcacacagtattccctgggtcctaagagtcaggaaagatgctgcagggttccctttgagggtaatgtgggtagggacgtgttcaaatggactagggcttagcctctccccacccttcaacctctggctccatcagagacacttctttttgacttttgtatatttctttttattttattttagagacaggggtctcgctatgttgcccaggctagcctcaaactcctgggctcaagcaatcctcccgcctcagcctcccagcccctgggattacctgctcatgccactgcacccggcactctgttttgacttttaaatgaaatatttaatggagggtctccacagttcaaaaatatttggaaaatcagaagaccacaccagtgtgtttcaaactgcaatcttaacccaggaataggtcatgcaattttttttttattttttttttctagatggagtcttgctctgtcacccaggctggagtgcagcggcacgatcttggctcactgcaacctccgcctcctgggttcaagcaattctctgcctcagcttcctgagtagctgggattacaggtgcccaccaccgcggccagctactttttgtatttttactagagacggactttcaccatcttggccaggctggtcttgaactcctgacctcgtgatccacctgccccgacctcccaaagtgctggggttacaggtgtgagccaccgtgcccagccggtccttcaatttattgggattatattagttcagacaatatagcttatgtaacaagcaaatgcagactttaagttagaagtttattgacctctgtggcatagtcatccagggacccctaaggtcaccctagcccagaaagacactttcacttctactcacattccattggtgagaactagtcacatggcccttgccaaatgcaagggggtctggaagatgtggtccctagcggggcgggactagctgtaaagtttgtaaaggggagcgtgaattagttggtacacagttgatcgtctgtgcagtagggtcatgctcacacgtccctccacacacacacgttaaatatgtataacaagtgtaaatatacaatttaaaaaagtatcttttttttttggtttgtttttgttttgttgttgtttttgaaacagggtcttgctctgtcatgtgggctacagtgagccacaatcatggttcactgcagcctcaacctcccaagctcaagcaatccttccatctaagcctcccaagtagctgggaccacaggtgcatgccaccatgcccagctaattttttatttttatttttttgtagtgacaggtcttgctgtgttgcacaggctggtttcctactcctgtcctcaatcttcctgcatcagcctcccaaaatgccgggattacaggtgtgagctactgcacctggcctttacaattttttacataaaatgtttcaataaaaaagtgcatagatagatacagagatagcaataaagcaaatgtgacagaatgcaaccagttggtgaatttaggcgaagggatacatcagtgctcactatactagtctttcaaactttaaagtttgaaatttttcaaagtaaaatattggagaaaatgaaattcttaaaatttactagacctataagtagactaaaacaataagttataactaaagtaagatttggccggacgccgtggctcatgcctgtaatcccagcactttgggaggctgaggtgggtgaatcacttgaccccaggagttcaagaccagcctgggcaatatggcaaaaacccacctctacaaaaaacacaaaaattagctgggcctggtggtacacgcctgtagtcccacctactcgggaggctgaggcaagaggattgcttgagcccaagaggtgaaggttgctgtgagccgagattacaacaccacactccagcctgggtgacacagcgtaatcctagtgctttgggaggtcaaggcagaaaaattgccaccacacctggacttaaaaaatatttttactgaagtataacattcaaaacagaaaaaggcacaaatcatcaatgtatcgctttatgaaatttcacattttaacaaaagaatgaaataaaataaaatagaaaatatcatagagcatttcatgtagtaagagtaagatatgtatgtttttgaaacttttgttttatttatgtatatttatggatttgtgcttgatgttgtgataatagcaaaaatttatagagtacttactagggttttacacatattaactcctaattctcaaaatgtccctattggccgggcgcagtggcacacgcctgtaatcctagtactttgggagcccaaggtgggcggatcacttgaggtcaggagttcaagaccagcctggccaacatgctgaaatcccatctctactaaaaattcaaaaattagctgggcatggtggcacgcacctgtaatcccagctactcaggaggctgaggcaggagaatctcttaaacccaggaggtggagattgcagtgagccaagatcacgccactgtactccaacctgggcaacagagcgagatcctgtgtcaaaaagaaaaaaacaaaaaaaacagcatactttgtattaggtgaacccacaaagtacaggggccaattgtaggtagtccacaaacacttttaaatctttgtgcatttattgtatgttagaaaaatttatacatagcatattaaagcattaatataaaatatcttttaaaaattaaggtatatcttcaaaagaaaggaaaacatcaagtaaacaattatagataaataaagtacaggtaaaaggcagatgtggtaacaattgtatgaagaggaatacaagtgtctagggcttgggggccacacactaaacctggcatcagaaggcccagatctgggacccggctcatttgttttctagcactaggttgtttttcatccttgtataacaccatggcccaggtactactctaagcactttataaaaattaactcctggccgggtgcggtggctcacgcctgtaatcccaacacttttggaggccaaggtgagtggatcacctgaggtcaggagttcaagaccagcctgaccaacatggagaaaccccatctctaccaaaaatacaaaattagccaggagtggtggtgcttgcctgtaatcccagctactcgggaggctgaggcaggagaatcacttgaacccaggaggcggaggttgcggtgagccgagatcgcgccattgcactccagcctgggcaacaaaagcgaaactctgtctcaaaaaaaaaaaaaaaaaattaacttcttggccaggcacggtggctaacacctgtaatcccagcactttgagaggccgaggcagacagatcatgaggtcaagagattgagaccatcctggccaacatggtgaaatgccgtctttactaaaattacaaaaattagctgggtgtggcacatggctgtagtcccagctactcaggaggctgagacaggagaatcgcttgaacccaggaggcggaggttgcagtgagccaagatcgcaccactgcactccagcctggtaacagagcaacactccgtctcaaaaaaaaaaaaaaaattaactccttggccagacatggtggcgcacacttaaatcccagcactttgggaggctgaggcaagaggctcacttaaggttaggagttcaagaccagcctgagctacaaagtgagaaaataaataaataaataaattactcctttaatcctcacaaccgtctattgaggtaggtactgtcatcatacccatttctgagaaaacaaagtctcagagagactaaatagcttactcaaaaccacgcagcgcatgagaggcggagctagaattcaacatcaaggattgtattagaaaaggcaataccagcttatcaacccaaaacacgagaggagagtttatctctccttcacgcagttgtccagggtccccaactccttcctccctagatggaagatgggctttttttttttgagacataaatatatatatatatgtgtgtgtgtgtgtgtgtgtgtgtatacatatatgtgtgtgtgtgtgtatatacatatatatatatatatatattttttttttttttttttttttttgagacagggtctcactctgtggcccaggctggagtgcggtggtaccatcttggctcatcacaacctccacctcctgggttcaaacaattctcgtgcctcagcttcctgagtggctgggattacaggtttgcattaccacacccagctaatttttatatttttagtagagatgggattttgccatgttggccaggctggtgtcgaactcatgacctcaagtgatccacctgcctcggcctcccaaagtgctgggattataagtgtgagccaccaggccctgccaggaagatgggttttatttgaaccactgggccctactgggatgggtagaattttctgtatcattctgggatccacatcctcctctgaaaatggggttaataatgctagttctatttacccctcagggtagctctgctgctcaaggggatagaggcaagagtgtcctgcaaactgcaaaaagttccttgaatgtaaaatgttagtatgtattgttaatgatattgaccaaagctacattaccatgttacagtgaagattaattgaaacagtgcatggaaagaccttggttcacatacagacaaagtcagctgtgagtaatagccataatagtaatgtggttatgcaatttaaaatattgatttatctccaaattgggatatagttgtataggatctttcttactagcaagttaacacattacgtctataactaaaaaatcaagaagtcttgatttcttgagaagtcagtataaccatgatgtttagaaatacaaacaagaggctgggcacggtggctcacgcctgtaatcccagcactttgggaggccgaggcgggcagatcacaaggtcaggagttcgagaccagcctggccaacatggtgaaaccctgtctctactaataataccaaaaaaattagctgggcatagtggcgggcacctgtaatccctgctactgtggaggctgaggcaggagaatctcttgaatgtgggaggtggaggtttcagtgagctgagatcacgccattgcattccagcctgggcaacaagagcaaaactccatctcaaaaaaaaaaaaaaaaaaaaaaaaaaaaactgggccggccacagtggctcaaaatgctgtaatcctggcattttgggaggatgagtggggggatcgtttgaacccaggaggtcgaggctgtagtgaacaaacatcatgccactgcactccagcttggatgatagactgagaccctgcctcaaaaaaagagaaaggaaaataaataaataaatgaaaatttaaaaggaaaagaaaatatttaaacgctatttcaaacaatctcaaatgtacctggaaacagttgggacaggaagtcatgaagggaatggggcagagttagagaaggtcagagtacagccatgtttcacatcccagctgaaactcctccaacagctttgtatcgcccttcaaatacaacctgagctctttttctttctttctttcttttgtttttctgagttggagtctcactctgtcatccaggctagagtgcagtggcatgatcttggctcactgcaacctccgcctcccaagaagctgggattacaggcgcgtgtcaccatgcccagcaatttttgtatttttaatagagtcagggttttaccatgttgccaggctggtctcaaactcctgacctcaagcgatttgtccaccttggcctcccgtgagccgccgcgcccggccctgggctcttttctttgaccaaaaggctctcacaggctctgactcttgtctgatggtctctcgtctttctccctttggtcactgcagtcagccacactggacttttgttttttttgtttgtttgtttgttttgcgacggagtctcactctttcacccaggctggagtgcggtggcgcgatctcggctcactgcaagctccgcctcccgggttcacgccattctcccgcctcagcccccccaagtagctgggactacaggcgcccgccactgcgcccggctaattttttgtatttttagtagagacggggtttcaccgtgttagccaggatggtctcgatctcctgaccttgtgacctgcccgcctcggcctcccgaagtgctgggattacaggcgtgagccacaacgcccagccacactggccttttgacaatccttcaatcacgccaagcacactcctgccattgggcctttgtacttgctgttctctctgccaggaatgcctcttccccagatctttgcatagctgatttcttctcattgtcagggccttagttcaaatgtcctccactcagagcagcctcccttgaacacccaaatctaagcctgccccacctccatcccttgatagcaattccattatcctctacagcgctgaaattacgtattccttgatctgtttatcatctgtctccttcacagaagttccatgacagcagggagttaggctgtcttgtcccctgctgtatccccagcatgtagaacagtgcttgacacacagtaggcgccccataagtatttgcggaatgagcaaatacagatggggacagctgagtcagtagggtgagcagctggatgggccagtagtggagggaggaaacggcagcctctgcctgggccttgccctgggtaaacagacctctctctccccagacagccactgtttgacgactgtctgccatgggcctggctgagcctgggccgccaaactgccaacgcctctgtattctctgggacaagcagtggaggcagccatacctccagcagagtttgtgaaggagcaggtcagaaagttgtcaaaacaggcatgacgaagggcagaggaggtggggagacagggagagagcaggcggccctgccctgggcagagccagagaaactggagggaggcctgggtgctcccctgggcagcttcccaggcaaacccagctgcctgcagggctcagcgctgggagcaggttgtggtcccagctctagccctgacacacacaggatctcaggtacttgacatttgtaggccttagcttccttacttgtaagttagaggctatgggcagattagtggctttcaaacaattttttttgttgttgctttttgtttttgagacggagtctcaatcttgtcgccgaggctggaatgcaatggttcgatctgggctcactgcaatctccgcctcccaggttcaagtaattctcctgcctcagcctctggagtagctgggattacaggcgcgtgccactactgcccagctaatttttgtatttttagtagagacggggtttcgccatgttggccaggctggtcttgaacacagcaagattctgtctctacaaaaaatacaaaaattagaggctgggcccggtggctcacacctgtaatcccagcactttgggaggtggaggtgggcagatcacttgaggtcaggaattcgagatcagcttggccaacagtgggaaatcccatctctactaaaaatgcaaaaattagccaggcatgctggagcacgcctgtaatcccagctacttaggaggctggggcaggagaatctcttgaacccaggaggtggagattgccgtgagccaagatcgccactgcactccagcctgggcgacagagcaagaccctgtcaaaaaaataaattaaagaaaatcccaactttcacctcctttaaaaaaagtgaaggtctagcaacactgatacctatgagacaacagtctcctggagccactttagattctcatgcttcctctaatttgccgtagtccccactattccttagtgtccccatacggaaacttattaatgaacataaatcaccatgtttgctgtattgtttttcttagaggaacgtgtgaactttgctcacaccctatctgttccatttatttcagttacttctctgggtattgagggcacttgagtgtgggacccctgatcactgagaccaaagcagagttcatttatttgcacgagcaatcttctatttcatagatttaccatgtttttaagtgactacaagaaaagtttaaattatgtctgtggctcacattctatttctattggccagcactggccgggtccctcagattctatagcagtgtacgtgtgcttgctgctaactcattctgcctccattttccattcttgcgtagaccaatcccagtcaaatctcttgggctggtgtcttctccccaccccacagttatctttggtgcctccaccctggttagctggccacctgtctgtccagaggatccaggctccagaactccaggcatgtcttctagaattctccacatgggaaatctcactcccaggccccatctggcagccattgtgttttctttatcagacattcacataaaacaatagtcaatttgaaagctaaatacacatccattcttctgtctccagcctgtaaatttaccccaaatccagtaatttgggaggtggagttggtgggaagaggtttttttttccccctcttctccagggcaagtcatatagtttttctggagatgaggtggactgagtttgggggaagaacacaggtccatctacagtgaaagcgctgactttgtttttggagaagatggtgtcatggcttctctggggagatgagatgagggaatcctgaagacttagggggccgggaggaaaaggaatcttggcaatgatgaagacaccttcaaatgaaggggctaatagggtagtggctgagaatttgtgctgcagtcgggagggcttgggttagagctacatccacagtatgaccttggacaggtgactttatctctctgatcctcagtctcctcatctgtaaaataaggataagaatagacttgacttccacttcaacgagaagtgaaacgagatatcctaccactgcgctttgcacataaaggctctataaatgtcagctgtcatcataaagagccaaaagtggcatttggagtaaatctgatttgtttttaagagatagggttttgctgtgtcacccgggctggagtgcagtggcatagtcaaaacccactacagcctcaaattcctgggctcaagccatcctctcgcctaagcctcacaagtagctgggactacagacacacaccaccatgcctgtctaacgtttactttttaatttttttaagttttaaaattttctgtagagatggggtcttactgtgttgcccaggctggtctcaaactcctagcctgaaatgatccttccaactcagcctcccaaagcactgggattacaggtgttagccaccacacccagcctagtttaattcttttttaatcatccttctctgcatttttgtaattcctctaccatgaacctgctttagttaagtaagaaacagttaactgggggaggagaaataaaaccaaacccctaaaaagcccctaataaacccctaaacgtggggtccaacatgaggtgttatggctgggaaaaggtaagagatcaaactatacacacccttttttttttaaattaaactttttagttttttcagagacagtcttgctccattgcccaggctagaataatggcatgatctcggctcactgcaacctccgcctcctgggttcaagcaattctcctgcctcagcctcctgagtagctggaactacaggcacgcaccaccatgcctggcttctttttgtatttttagtagaggtggggtttcaccatgttggccagcctgatctcgaactcctgacctctggtgatccacctacctcagcctcccaaactgctgggattacaggtgtgagccactgcaccaggccttaattaaacttttattttagattcagggggtacatgtacaggtttgttacatgggtatattgtgtgacactgaagtttaggctatgattgagctcatcacccaagtagtgagcatagtacccaacagagagttttttagcccttgcccttcctctagaagtccgcagcgtctattgttcctctcttgatgtcaacgtgtacccaatgtttagcttccttttacaagtgagaacatgcagtatttgtttttttgtttctgtgttgattcacttaggatgaggtcctccagctccattcctggtgtggcaaaggacacgactttgttcccttttttatttttttgacactgtccttgaacttggttgaggttttgttcccttttatggctgcatactattccatagtgtatatgtaccacattttcattatccattccactgctgatgggcacttaggttgattccatgtctttctactgttttgttttgtttgagatggagtctcactctgtcacccaggctggagtgcagtggcgcaatctcagctcactgcaacctctgcctcccaggttcaagccattctcctgtctcagcctcccaagtagctgggattacaggcatgtgccaccatgcctggctaatttttgtatttttagtagagacacagttttaccatgttagccaggttggtctcgaactcctgacctcaggtgatccgcccgcctcggcctcccaaagtgctaggattacaggcgtgagccactgtgcttggctgatgtctttctattgtgaatagtgctgtgtagaacatataagtgcatgtgtctttttggtagaagaattcattttcctttggttatataccaaatcatgaaattgctaaattgaatggtggttctgttttaagttctttgagaaatctccaaatagctttccacagtggctgaactaatttatattcccaccaacagtgtataagtgttcccttttttccacagccttgccaacatctgttatttttttgactttttaatgacagccattcttcagatatcaagggtggggacaaaaaaagaaacttaataatcattttgactagtgtgagatggtatctcacgatttcatttgcatttctctgatgattagtgatgttgaacattttttcatctttgttggccgcttgtacatcttcttttgagaagtgtctgttcatgtgctctatccactttttgttggggttctttgttttttgcttgttgaattgtttaagttccttgtaggttctagctccttgtagaattgctaagttccttgtagacctttgttggattcagagttcgcaaatattttctcccattctgtaggttgcctgtttactctgttgatagtttcttttgctgtgtagaggctctttagtttaattaggtgtcacttgtcaatttttggttttgttgcgattgctttggaggatttagtcataaattttttgccagggaaatgtttttgttttttttttttgagacagggtcttgctctgtcacccagggtgttaataacttaacaaactgagaccccaagaggaaaggtgattcggccaaagtcatacagtaagttagtggcagagccaagactagaatggtggactgtgggtgttggaagggaactttgaggttgttagggcagcctttcctaaggcgaggcccctcagacaagaaggattctattgttagatgtttgaaaactgctgaattaaagaaagctgcacaaatttcattatccgagaacttctcagaattcttaacacatgacaataccttggccactccaagaaatgcctgcagtgtatagggccctgaattagtttcaagagtcccttgaaggacattgacacctatgcaagctctccctgctctcagacagagaaatgctatatcttagatatactcctagttgcttttaaaaaataggattctagggccgggcatggtggctcatgcctgtaatcccagcactttgggaggttgaggcaggcggatcacgaggttaagagtttgagatcagcctgaccaacatgatgaaactctgtctctactaaaaatacaaaaaaaattagccgggcatggtaattagccgggcatggtggcatgcacctgtaatcctagctactcaggaggctgaggcaggagaattgcttcaacccgggaggcagaggttgcagtgagccgagatcatgccactgcactccagcctgggcaacagactgagactctgtctcaaagaaaaaaatatatatatagatttctagatttttatccacggttgcttgtcattgtgcaaattgttgtcattgtgcaaattgtatgatttttaaaattatactaccaaattgtctgtcgctggtatgtaggaagatggttgacttttttttataatctcatttctcctttttttaaagtaagaaatattacaaatatgcagagaagtatagagaataatattatgaacatttatgtatccacctctcaattttgtcaaatcttactacatgaccatgttttctttggatgttgtttgtttgtttgtttgttttaatgacaaattaaacattacacttagagttgaagccccttgtcttcctgatcccatcaccctgccacccttatcagtggtgatcatggtcaccatttggtatttatcatgtgtatttggtatttatctggtaatgtgtcattaccagacacattttcacagttctaccatacgtggctatataagcaaagtaaaatattttgcttatctggaaaatttatttaaatgatatactgtacatatcctgcagcaacttccttttattactcctcataataggtctctggatcttttcatgatgatacaagttgcaccagaccactcatttaaaatgctgtgtaggctgggtgcagtggctcacctgtaattccaacactttgggaggccgaggcaagtagatcacttaagcccaggagttcaagagccagcctgggcaacatggtgaaaccctgtctctatcaaaaaataaaataaaaaagaaataaaatagataaaatgctgtgtatccatgaagtactatacagtcataaaaaagaatgaaatcatgtcctctgcagcaacatggatatggctggaaaccattatccgaagcaaactaatgcagaaacagaaattcaaataacatatgttctcacctatacgtgggggctaaaccttgggtacacatggacataaagatgggaacaataggcactggagaaaccaaaggggttagagagggagggggcaaatgttgaaaaactacctattgggtaccatgctcattacctgggtgatgaattcattcatactggaaaccccagcatcatgcaatatacctttgtaacaaacctatacgtgtacctcctgattcgaaaataaaagttgaaataacgggccaggcaatgtttaaaaacacatgcagccgggcgcggtagctcatgcctgtaatccaagcactttgggaggccgaggcgggtggatcacttgagatcaggagttcgagacaagcctgggcaacatggtgaaaccctatctctattgaaaatataaaaattaaccaggcctggtggtgggcacctgtaatcccagccacttgggaggctgaggcatgagaatcgcttaaacctgggaggcaggtaaaaaaaacaaagttgaaataacaaaaaataaaataaaagtgtctgtaaatatcctgagtatatttattctgttttgtttatttgtttgttttgagatggagtctcactctgttactcaggctggagtgcagttgcacgatcttggctcactatctcagatgatgctccaaagactattcttatacctgtggatgagagtttctctaggtaacatgcagagatggaatttctgtatcttagacagtggatatcaacacttttaagagatgttgctaaattgctcattcttgaatgccaacttccacttccaacaatagttacagagttttggttgctctacaacctcatcagcacttgattttgtaagatactgaatgtaaaattatgcttcactttcaaatttacatttcctctattactagagaaggagaggctcttttgccatttgagcttcctacattatgagtgtgcttgtttgtatcctttgaccatttatctattgtattatttacctttccttatcaatttgtaggcattttttagcactcttagaaacatcttttatgcatgtatttttttttttttttgaaacagagtcttactctgtcgcccggctggagtgcagtggcgtgatctcggctcactacaacctccacctcccaggttcaagtgatttttctgcctcagcctcccgagtagctggggttacaggcatgcaccgccgcacccagctgatttttgtatttttagtagagacagggtttcactatgttgcccaggctggtcttgaacacctgaccaaaggtgatccatccacctcagcctcccaaagtgctgggattacaggtgtgagccaccacgcccagccgaccatttttaaacgtacagttcagagacattaaatatattcacattgtaatacaaccatcagcaccatccatcacctgaacttttttcatcttcccacactgaaactgtacccattagaaaatagctccccttgggaggctaacatggagaaacctcgtctctactaaaaatacaaaataaatactaaaaatacaaaaaaattagccgggcgtggtggtgcgtgcctgtaatcccaggtactcaggaggctgaggcaggagactcgcttgaacccgggaagtggaggttgcagtgagccgagatcgcaccactgcactccagcctgggccacagagagagaccccgtctcaaaaaaaaaaaaaaaagaaaagaaaagaaaagaaaatagttctcctttcttcccaggccctggcaaaccccttctactttctgtctctgtgaatttgactactttcctgtaggctagtggaatcatacagtatttgttctttgtgactagcttttcccctagcataatgccctcaggatccatccatgttgtagcatgtgtcagaatttccatcctttttaaggctgaataatattccattgtatgcatataccacattttattgatccattcatccattgattgacacttgggttgcctgtaccttttggctattatgaataatgctgctatgaacttgagtatacaaatctctcttccagatgctacttttggttcttttgggtatatactcgggagtacaattgctagatcatatgatagttctatttttcattttttaggaagccgccatactgcttgccacagaagctgcactattttacgttcccaccagcagtgataggaacgtaaaagggttacaatttctccacatcttcaccaacacttactattgtctgttttgttgttgttttataatatccatcctaatgggtgtgaggtggtctcttattgtgtgttttgtttgtttgtttgtcttggttttttttggagacatagtcttgctctgtcgcccaggctggagtgcagtagtgcagtctcagctcactgcaaacttctcctccagggttcaagcgattctcctgcttcagcctcccaggtagctgagattacaggcatgtgccatcacacccggataatttttcttttcctttttttttttttttttttttgagacagagtctcactgtgtggcacagactggggtgcagtggcgcgatcttggctcactgcaacctctgcctcccaggttcaagcgattctcctacctcagcctcctgagtagctgggattacagatgcatgccaccatgcccggctaatttttgtatttttagtagagatggggtttcaccatgctggccaggctggtcttgaactcctgacctcgtgatccgcccgccttggcctcccaaagtgctgggattacaggcgtgagccactgtgcctggcccacacccagataatttttatattgtttagtagatttgggattttgccatgttggccaggctggtctcaaactcctgacctcaagtgatccacttgccctggcctcccaaagtgctgggattacaggcatgagccactgtgcccagcctcttattgcagttttgatttgcacttccctaatgattagtgatgttaagtatctttttatgtgcttaatggttatttgtatatcttccttggagaaatgcctattcaagtcctttgccaatttttttgttttcttgagacaggtcttgctctgtcacccaggctagagtgcagcagcaggatcgtggctcaccacagcctcaaactccttgactcaagtggtcctcccacctcggcctcccaagtaagctgggactacaggtgtgcagcatgcctggctaatttttaaatttttctgtagagacaaagtttcactatgttgcccaggctggtcttaaactcctgagctcaagcaatcctcctgcctctgcctcacaaagtggtgagattacagacttgagccactacacctggcctctttgtccatttttaaagtttttggttgttgttattgagttgtaagagttctttatatatttcggacattaaccccttatcagatatatgattggcaaatattttctcccattctgtaagttgctttttcactcagtcaagtgtcctttggtgcacaaatttttctaattttgatgtagtccaatttatctaatttttaaaaatttcctgtgcttttggtgtcatatccaagaaatcatcaccaaatctaatatcatgaagcttttcccttatgttttattccaaaggttttatacttttccgtcaaactcatttttagttaattttcgtatatggtgtaaggaaagagtctgatttcattcttttgcatgtggatatacagtttcccaaacatgaatttggttttgatagtactttgttaattaagacttttgcacctggtagacgctctttgacctctaacccactggaatcctctcaccatccttccctgacagttgaccatttagcttgggcttaatacttccaatgacggaatactcactacttaataaagcagcttttcctgtggtagaacaattgtattttatagaaagatctccattttgagcctcaagtttcctccctgtagcatccacattttggtcctcgttcattctctgaagctgtaggaatcagtgagagctttttttttttttttttttgagacagagttttactctgtcacccaggctggagtgcagtggcacgatctctgctcactgcaacctccaactccagggttcaaatgattctcctgtctcactctcctgagtagctgggactacaggcacatgacaccacatctggcttatttttgtatttttagtagacggggtttcaccatgttggccacgtgaaactggtctcaaactcctggcttcaactgatctgcctgcctcagccccacaagtgctgagattacaggcgtgagccacttcacccagccagtgggcactcttttccaaaggaaagtactttgttgccttttttttgagactgagtctcaatctatcacccaggatggcgtgcagcggcacgatctcagctcattgcaacctctgcctcccaggttcaagtgattcttgtgcctcagcctcccaagtagctgggattacaggtgactgccaccacgcccggctaatttttgtgtttttagtagagacagggtttcaccatgttggtcaggctggtctggaactcctgacctcaagtgatccacccacctcagcctcccaaagtgctgggattacaggcctgagccaccgcacccggcaggaaagtactttgaattgagtaaataacgcaactatatgctgggcagctacctgccaggtttataaggtttaacacatttactccacaaagcaatctatgaaaaggtcctatcattgattcctattttatagatgaagcaaataaggcttgaagagcttatgattttagcaaggtccaacagctatgtaaatggcaccactgatatttcaaaggcaatggccctgaccactctgctacaccacctttctctcctcttctccaatacccagcccaaaactcttttggatctttgattattcttcaaggggcatagctttctttctttctttctttcttttttttttttgagacgaactctcgctctgctgccgggctagagtgcggtggcgagatctcggctcactgcaccctccgcctcccaggttcaagcaattctcctgcctcagcctcccaagtagctgggactacaggtgcgtaccactacgcaaggctaatttttgtatttttagtagagatggagtttcaccatgttggccaacatgatctcgatctcttgacctcgtgatccgcccgccttggcctcccaaagcgccaggattacaggcatgagccatgccgctgcactcggcctaaggggcatagctttctcatcctctgccatcctaggaaaattttaagtattcatattaaaatgaaaactaaacacaattgtccatatatgctccttaggagtagaatgccaaggacctcttagctcctctgacctgggaactacattctctctaatgatacatacgactgggttagaggtttgggcagctgccaccaagtaaaacctctagaattttgctatgtcactttctgctaaggtagcttttcccatctacactaaataaataaatcatccaggtgatttatttttaaccaatgcagaggattttttacttatctccatggagttcaaacatttctccaggctgggtggggtgactcacgtctgtaatcccaacactttgaagactaagaaggggcagattgcttgaacccaagagttccagaccagcctgggcaacatggtgaaatcccatatctacaaaatatagaaaaattagccaggggtggtggtccacacatgtagtcccagctactctggaggctgaggtaggaggatcatctgagcctggagacttggaggctgcagtgagctgtgatggcgccactgcactccagcctgagtgacagagaccctgtctcaaaaaaaacaaacaataattcaccaaatctatttggatctggatcctgccatcattttataggtaatgcctccatagcactcactaagtgccaggcacacttctaagccctttttatacattaacacaaataatccccaccacgacctaatgccatacacatcattatggtcactattttgcaaataagaaaacagtcacagagcagttcagtaacttgtccagggtcacacagctagtccatgactgaaccagaatttaagcccaggatgtcaagttccagaattggtacactcagcctcaatactgtgctgccttcaaatattctgacaatcttagacagctttggggatccaaaagattgagaagtactcttggggacctcttttttttttttttttttaaatacggagtctcaactctctcccccaggctggagtgcagtggtacaatctcagctcactgcaacctccgcctcctgggttcaagtgattctcctgcctcagcctcccaagaggctgggatattacaggcacatgccatcatgcccagctaatttttgcattttaagtagagacaggatatcaccatgttggctagggtggtcttgaactcctgacctcaagtgatctgcccacctcagccccccaaactgctgggattacaggcatgagccaccgcacctggctcccattttttttttaagacggagtttcactcttgttgcccaggctggagtgcaatggagcgatctcggctcactgcaacctccgcctcccaggttcaagcaattctcctgtctcagcctcctgagtagctgggattacaggcacatgccaccacacccggctaatttttgtatttttagtagagatggggtttcctcatattggtcaggctggtctcgaactcctgacctcaggtgatcttcccacctcggcctcccaaattcctgggattacaggtgtgagccatcacgcctggcccctggctccttttttttttttttttttttttttttaaataaagaccaaaggtccagaggctttgaaaggcaaatagtattaagtcaggatttgatatcaggatttctttcattctgtttattttctcattgctttctacttatgatactgtttcatttggtagtaataatatttctttctaaaataaattgaagtaaaaagaagtgagttgatgtaagaaaaatgttacagatatgaaaaaatcataatggtcattaaaaaattagtgaaactttggaaagactgtgttcagtcaagtgaagtgaagttagcttgcaaccacaaaaaaacccctaagtctcaatggtttgaacagcaaagttaattgctcacctatagtacacgcccagcatgggtcggcagggggcgctccgcgttgtggaacgattcatatctatacttgcttccccaacaagggcagcactggcctttaaagcttctgcccaggtgtgacacaggttgtttctgctcacatctcgttacctgaaacaagtaacatggtcacatctcatttcaaaggaagcaagaaaatgtaatccccatcatgtgccggaaaggagagaaatagaatagttgagaacagccctcagagagactataagtaagggggcataaaagatgggtctagagagataggctgagtcatgactcactgaatttgtctgacgtagatcatgatggcccatcccaccaagtggccaacatttgttcccagaaaagggagtgtgatgatcccccagaaagaacacagtctgacaacattattctgatgagcagacacacctctcaggctgccactcaggagtccttttgggtggggaggtggggatgctgatatttcctaagtggtttcagctgaactctgtgatcttttttttttttttttttttttttttttgcctattccctgaagggagatgaggcaatttgggctttggctgagctagggtttggttctgtcaccacttgctatctagggaagggtaataattggaaaggagaggaattcaaggagagggtccaggtgggtagggagcctcacacagggtttggtgatcaggtgattgagaggcctccttgaggagttttcaaagtgcggtctgagggcacctggtatcagaagtgcccagaagctcattaaacacttgggccaggtgctccatggctcctgcctttaatcccagcactttgggaggctgatttgcttgaggctggggttcaagacaagcctggacaacatagcaagacacctccccccgtctctattttttaattaattaatttgtttgtttattaatttatggactctcactctgtcgcccaggctggagtgtagtggcctgatctcttctcactgcaacctccgcctcccaggttcaagcaattctcctgccccagcctcccaagtagctgaaattacaggcatgcaccaccacacccagctagtttttgtacttttagtagagacaaggtttcaccatgttggccaggctggtcttgaattcttagtctccagtgatccacctgccttggcctcccaaagtgttgggattacaggcatgagccaccatgccccacctctatttattaaatattttcttttttttaatctgatgactaggcccactgttggtcctggcacctggaggtaggaccccaggcatctgattttttttgttgttttttttaaggcagggtctcgctctggcgcccaggctggagtgcagtggcacgatcttcactcactggaacctccacctcccaggttcaagcgattctcctgcttcagcctcccgagtagctgggattacaggcatgcaccatcacgcctggctaattttttttttaatagagacagggtttcaccatgttggccaggctggtcttgaactcctgaactcaggtgatccacccacctcccaaagtgctgggattacaggcgtgagccaccgtgcccagccaccatctgatttttttttttttttttttttttttgagacagagttttgctcttgttaaccaggctggagtgcaatggcacgatcccggctcaccacaacctctgcctcatgggtttaagtgattttcctgtctcagcctcccaagtagctgggattacaggcatgtgctaccacgctcggctaattttgtatttttagtagagacgaggtctcaccatgtttggcaggctggtctcgaactcctgaactcaagtggtccacctgcctcagcctcccgaagtgctgggattacaggtgtaagccacctcgcccagctgccatctgaatttttaataatggccccagatgattcttatggacaccaagatttgagaagcattgaatgactgagagaaaatttcttgtaagggtagaagcccagcacagtggttctcagtggagataatttcaacccccaagggacatttataaatgtctggagatagttttgattatcacaccttgagggtagggaaaagtgctgctgacatctagtggctagaggccagacatgctgccagggacaatgtacaggacagtccccacgacaaagaattctctagcccaaatgtcattagtgcttaggtcaagaaaccctggttagccattaagagtttgaacctttctaaatgttggagcacatacgatttttaaatcttcaatttttattttattttccaaaatttctactatatgcatagaatccttttcattgaatacctgttacgcaccgagcacttgaagtttacatcactatcagttcctcttgaaagaccttttcagtcattcatccaacaactatccattaaacacttactaaaatgtattccaggccaggtgtggtggctcatgcctgtaatcccagcactctgggaggccgaggtgggtggatcacctgaggtcaggagtttgagatcagcctggccaacatggcgaaaccccgtctctactaaaaattaaaaaattagctgggtgtggatcccagctactcaggaggctgaggcaggagaattgcttgaacctgggaggcggaggttgcagcaagccgagatcgtgccattgctctccagcctgagtgacaagagcgaaacttcatcttaaaaaaaaaaaaaaaaaaaaaaaaagaagtattccaggcagaggggaaagtatatgcaaaggcccccaagacaggaaagaaaaactttaaaatggctagtatgcctgctgctgataggggtgggggcaagtggaatgaaatgaggttggacacggagggatataaaaacaagggcgtgcatggcctcacagtgttaagtgggagttgtatgagttttgttataaatgcataggaagtcataaaaatttaagtagaagaggatctgagccaatgtacatttgtacaagatcacccttggcccctgagtgaagagtagggggtagggaagccacaggagaaaaagtgaaggggtggggtggaggcaggcggggggggggggaggcggggggggcggtggagcgggggagatcccctccccaaccctggcaggtttaaaaaaaaaaaaagggaagaagtgaaaagacttttgcagacctccagagatgatgcataaggttggctggggtggagatggaaagatggaaaatctagattctgtttggagggtggcaagaactggattttctgatgaactggaaggcatgagaaacacaacacaaagattgtgacttgcaagatgttggcttgaataattgagagaaggtgggtgatgatatatgacatgtagatatgactatcattctcttttgacgactgaggaaggggaggtgagtcgtcctacttcacaaagatagtatatgggctccaggtgtgtctaacccaaaggttataatttttccacactcctatatccacacattaatttttttttttaaattgagacagagtctcactctatcacccaggctggagtgcagtggcgccatcgtggctcactgcagcctccaactcctgggatccagcgatcctcccaccttggccacctaaagctggagttacaggcatgcaccatcacgccctgcctatcttaattttcataatgggtatgacatttactgatagtaatatcattatacatgccccatacatgctaacatctgcttccacatggaagcagcacaaagcctggaaccttcctcaaagaccccccccacccccgtacattggaacaaggtgctgggaacagaagtttagtaggtggtggaagggcagcggctgctaccctgggaactggttttaaaatcttacgttctgattgctgccgtggccatgtgctggtgtgtgatggggagatgttcttttaggtaactaaatccaacgagctgtgattggtgatcgaaccgagcaggcctcctctggatttggagagacatagtgcgtctgggcctgtgattggcgggattgctgtgattggtgaagtccctaaggctatctaagtttctgaacaccagttcctgcgttggccacgaggaggagcccaggaagcgcaaagcgcagcactgcggagagtcttggccgcctcctccgggacgccctccggcccagcgcggtgcctgccctgccctgcgccctggggcaaccgcgggatgaggtggggcggcaaagggtgtcagggctcccagctgcggcccgggtggccacgcttctctgcacagttcctttggcctcttcccctggctcccagccccacagaagacattggctgacccgaggggtggggctgcgggttcgcgaaggtttgtgaaggcccagatccaagttgcaaaactgtggagtctatcaagtgagacttagcagccccactccctcaggtgcgccccttgccctcctcagagtccttctctcaagtttagcagcctccaccgtgccctttaagatcctcaaagaacttttgcaaagtggcatctcattggagctaaaatgacctgtgcaggcaaaggccactagctcaggggatcgtcctgcccatccccaggtgctatcacatcgcgctgtgcgtcttcactgcacttaaccactgtttgtaattgacttcgtttttcatgtatttacttgcttatgtctgcaacccgcctctccaccaaaacgcaagctctgtgagggagggtgtagggttgcccgacacaacacaggacacccagtttcatatgagtgtcagatgaacaccacagtttaaaagtataagcaggtcccatgcattatttgggacacgctcatactaacgaagtatttcttgtgtatcttaaattcacatttgactgggcatcctgtatttttatttgctcatctgcacccctctgagggggatattttgcccatggtcttccctgctgcatctccaccacccacaacgatgcacgcagaaggtgctgaataaatgttgactgtttcgatggacgatttccatcctttattcactcagttattcatccagcctatttatatcaagtgggtcctgggaatacaatggtagatgggacacagtccagtggaggaggcacacaaccagtctaattaccatctgactaaacgatgatgatgtaaagctttgggggctatggggggacagaggaggaccccggcgttctgtttcccggaggaagatgactaagatgggacttggaggatgagaaggcaaagaaggaagtgcgacagctctctgcttgagaccacggggttctggaagctgcagggggctggggagggcaaatgtgcagtgtgggcgtggcagtcaggaaaaggtgagaaggagactcacattcactggatgttactacccaccagccagcacaagagggatgccatgttgctattattgtgcccatcatacagatgaggaagctgaggctcagagaagtgaaatgcctcggctaagtttacagtcgtggagggaaaagctgagcttcaagctcaggtctggcagactctgaagcctgcactcttctagaaaagccactgggttaaggattacaatgccaatagggggatggagaaacacgctcagaaaggtgatagggctctccctgtgaatatggctctgtccagttgagcagaatactgaagcaatgcaagagttatggttttttccaagccctccagagagacaacaggagggccagagcaggacccaggagtccagaccactgtgtctcccattcctattggggttggctctctaggagccccttgcagagccctggggctaattccttgcatggatcctggacaggtctgcagtttccatggagaccgcctcccaccatccctgaaatctcattgtgaccagtattaagggattaactctgcccagcggccctcgcagggtctggggtgctgagaggggccagcaggagctccctcaaggatgaagaggttgtgcactgtgcgggaccccatagcagcaggaggaggatgtcggactggggccagggcttcccccaggacccaccaggtatggtcctgactccacatctgcctggaaggaaggatgggatggtaggagagagacacagaaccaagggggaggattccagactgggagcagtgtggaggatttgtaccctcatcccctaacccaggaacgtccatggccctgatgggtgaatgacgttccaatcagagaaggagaatccagacgacctcaacaaggtgagaggagccccgtagagtattaggggtagtccaaggctgcctaaagaccagatctcttatctctctcattttgcagttggggaaactgaggcacggagagggaaaatgacttgcccaaagccagtgagtcagcaaactgaagcaggtcaagaatccagagggaaccctgaagttccctgagcagaaaacaatcggttaaaatctcattgccacttctgccttgaactccaaatcctccttcctgagctccaggcatggggtcccctccatcccctcacccagagcttgtctcatcggccatgcttccctccctgcctctcatcctcctcctgacttcccctgccacccgcaccacctgaggctggcagagagttcctggcaggttctccagtgctgacgggcacagccaccaggcccccactattccatccaggggacaccttcccactgggtccctatctggatgacttgggacattctttgttctacacttcatcctctctttgggatttctgagtccagacacagtgaggaccccgacagcccccctcctcacctcttgtcctgggaaggccaggcctgcatggcagagatgtaaccagactccaaagctttctgggccgggcttcatggaaggccgtatcggtgcaggggcataaacacaagctctggagccaggtagagatagttctaacaccattgccttggctcactgggaaaatgatgtttcttctctgagcctcagtttcctcacctgtgatgggagacgagaacccttccatcctcaaagcttgctctcagctgctatggaagcatctccaggttgtgatattaaatgaaccaaacaagatacagaacagtgtaagagcagaggctactcatgtatgatcttacatgctatctggtctgtataaagaaaccttggcagatacatctgtaagggatgtggttccccatagtgaggaagtcaaggagaacaggtgaacaggagacagctggaagcaagacttctcaatttacaccttttatgttttgattctgaaccatgcgaatgtagcaccaattcaaaactaaatgtaaagatgttcacaaattaagtaaaatattaaataataataataacacatacctcaataatatgaccggtgtgcagtcaagatttaggcccaggtactagaaattgactcaaagcaacagaggaggcctgtcttcaagtcaccgaatccttgacctagaaaggccctttattttgtcaacgtcaaattgcccataacaacaataatagtcttggtagcaagaatcaggagctccctacttggggaacatggtgccaagcactgtctgaacattatctcatttaattggcattttgattttgtgaggaaacgatcatcattccctctttacagatgggaaaactgagcctcgctgaggttttgactagtaagttgtagtaagtgatagaacttgatgccatcgaaggctttccaggttcaaatttgaagcccccctacagtgggtctcaatattggctgcacaaaaatatagacgcctggcacctccccacccctaccccaagattcgatcattgatctgtgatagggactgggcatctgtctttaattttaaaaaatctttttaaaaaatagacatagggtctcactatgttgcccaggctggtctcaaactcctgggttcaagtaaacctcccatctcagcctcccaaagtgctaggattataggtgtaagccaccatgttcggccaacatctgtatattttaaaggtttcagatgattctatttcatcttcagagatgagtctctgctttgttagacaaaacttctccaatgggaaaccaaggccagggagggaaatgaccttgcccaaggacacacagtggctggaaccagagctggggcaggacacccagcagcttacatgaagccctagggcaaataagaaaaaggcaccccactctgggcaggcagagctccatgggcacttcgcttggcaagtggaacaagggctgggtttccatccctacctgccctcttggctggagaacctttgtgcagtgagcaacctgcacaactgtacagggcagtaactctgatctgagcctcaggacttccaaacacttcaccttagtgacctggcaaatccctggggcccctcagaacaagagtatggggagaccaagggtggcttctgggatgtgggctcagccctcactccccaaaccagagtctgggtcaggcaggggctcccatcagccttcaggccccacaagggccgggaaggccgcatctaattcccaaggtcacccctgcagataaattcaggaacataaacaggagggatgaacataaacaggaggacagcaacaccctcagcccagatgtcataagccacctggcaggaggcagcctgcggagaagctccacccacacagatccaagtcctcctggcttccttcctgatcattctccagaccatactctctgccctacctccggagccttacagtcagcatctcccacagtgccctgctctctgcccttctcctggccatctctcactggcatccctggaagggaagggtagccctggagttagaggcacagactctagagacagactgcccaagttccaattccacttcttgtttctcatcagctgtgtgagcatgggtatatggctcaacctccctgtgcctctggtgtgtaaaaaattggtgaaaacattgcctacctcccagagtggctgggaggatcaaggaagtaacacatgcaaagctcctaaaacagctgcatatccagtggccatgatgatcaatgtgtatattttgcttcatttcattttcatgacaaccctggaagttaagtattataattcccaatttacaggtgaagaaactgaggctcagagaggtggagagagtcagggcagggctctacatctttttttgtgatagggactgggcatctgtctttaattttaaaaaatctttttaaaaaatagacacagggtctcactatgttgcccaggctggtctcaaactcttgggctcaagtaatcctcccatctcagcctcccaaagtgctgatgcctccagagacaggacgtggctgagatggattataacgtagtctccggtttgcagtgcctggctgctggtcatatcctcacagggcccatgggacacagagccaggtgcattcccctgacttgggtcttccaatggctctcaggcacctctctgcttccagccagccctgggaggagggggagaacggcatggcaaggcgtttgcagagccgtcttgttcaccaatgtctttcaagacattgcccgggtccacagagagcccaccattcattcccatgctggctggagcccctgaatacccgaggtgaccttctgtccttggacaagtcacttccccctctgatctccatctccccatctgtgcaatgaggggatggggctgaatcagtggttttccaaccctcaaataaaatattaagactacatgtaaaagggagtcgctggttgaagctgggcctgtggatgcatacccttggctcctgggagcctcggaacccagcttgaaaaaccccagcccacatcctcctaaagattctcctggctctgacactgcagagttctagaaccccaagctcaaagctgccgcttcccatccctgtttggaaagctctcccccagctgcctttatctctctttggtaacagagcaaatttgctcaggacccagcacagggggaacaagcagactgttgactcttgagcaaagcctcttctttggagagcagccgaggtggccgtgggctatgcgttgggaggccagcggcctcttgcataaccctggaggcctcctgcccacccaggccttttcagggttaggggtgaggaaaaccgcaaactcatgcccagttaattttttaaggcaaaatcaacaggctcagcaatgattagcagctgggtaagttggtcttaatcaggctaaggacagggagggaggaaggaggcccagggatggggcccagttatcagttaaccacatgaatgttgcttccttccaaacccactggccttcagccccaagctccctcatcttcctctcggaaatactcctgtgacaagccagtggccacccatcatcgggtgaacaagccagtggccacccatcatcgggtgaacaaacacaatgccactcatggtctgtgatgaagtagaaagtgctcgttgttaagacaaagctcacccaccaccgctgcgtggacttgagcaagtccctttcaccctctgaggctccgtgaggggccccaggtctgggccccaagtctatggttcagtctgtggccagctgccactcccctgacggcctcagtgtttccgtccactaaatgggtgggttagccaaggcatcttttccagtcttgaagctttgtgggtgcctgatttgattaagccacagtggcctttgccgagtgcagagggtggtatgagtggcattttaggagctcaaggaagagaaagggaggggacctacctggtatctgccgttggtatcagcaagtgtcagatcccagctccaggaagagggctgtcctctcagatgggaggcaggggtccagtggggtggctgtggctgcagggacagcctagcagagcctcttggtggcccagaccccctgtccctggaccttggaagccgctaaaggaagcagcaagaccaggccagctggtggctgcctggactggagtttggtcagtggttggggacctatattgtgagatagttaggactttgtccacaaactggaatttgaaatttcaaaggggcaaaactgaagggccctaccccagagtagagatggctcttggcttctttcctccacgacttttgttctttgtcttgataagtcccagttttctctgcacctctcccggagtggtgggtggggaagaaaagataggagataatggtgtggtgagcgccaaggggaagtgaagatgccaagcagccctggggtggccaggcgtgtggaggatgcccctgcccctgcctataccccgggataaggtgctttacttctcaggtccttgagttcccctgcaagactgaggcagtgaaaccaccagctccagtgccttagaattccgaagtcctttcagggattccaggagtcatgatgcaggcaatgcgtagaggggtgaagccctcaagctctggaggcagactcgggttcaaacaacagcccctcccttacgagctgtgtggctttgggcaagtcacttcacctctctgagcctcaatttcatcatctttaaaatggggatgacaatagcccctatctcaacaggcagataatatgagaaggctagaaggtttttagcaccagggctagcacaaaatttctctgtaaacattagaccttattataatgtaaaagagaaacaatgtggttcgtagtggcagctcccttaccaccgtccacagcagaggcacaagctccctacacatgcctccccaactgcaggttgcccagggcaatcccttcccgtctcaactgggtctctctgtgggctctgaggtcctctgctatcccctggaatctgctgcctcttgagctggggcccgacagcaagtgagcagaggtaaagaacagctgctaaattgatggcattgaggctagtgcttgttcatggctgggtgtgtggtacctggagctgtcctgagcaggggtcctgattccaactgattatgtggccagtgtgtcatgcaatcaatgaccaatgacagtgattgctactattgtactgtatgcctacacgtggtcatttaatgcttgaaccatccctacaaagaaggtatcaacccaatttttctgatgcttaaactaaggctgagaaaagtagaagttgaggtcacagagtttggtacattggcactgcctggattttaacctagatctatctgacccacaaggtctgtggtttattcccctaaagagaggtcaggggaagagaggctaagaagcttatctactctctcatttaatcttcacgacaaacgacaagttagaccccttgtacagaaggagtaaccaaggcttcgaaataaaaacttgccttgtgcagacagctggccctgggcttggaatataaatagtcactggtatacaggcaccagagaccaatacccacaggctaacacccactcagtccacagaaagaagcttaatattttttataagcatagaaataaaaaccaaaccaatactgtgacatttgctctgtgacttcctgtatttattatgtgctcatatgaaagcacctaagcattgtcaggataatgttcttcctcactggagggcgttatgaagttgctttcttttttccactagttaaaaaaaaaatcccttggaggaagggaatgaaactttttataattgatacataataattgtacatatatatggagcacatgtattttgatacatgcataccatgcaaagtatttaggatatccatcacctcaaacatttatcatttctttgtgttgggtacatttcagatcttctcttctggctattttgaaatataaagtaaatgattgttaactataatcgctctactgtgctataagaactagatcttattccttctatctcacttatttttgtacccatgaaccaacgtctcttcatcccctgaagaaaacattctttttttttttttagacagagtcttgctctgtcacccaggtgcagtggaacaatctcggctcactgcagcttccacctcccaggttcaagtgattctcctgcctcagcctcccaagtagcctggactgcaggggcatgccaccatgcctagctaatttttgatttttgtatttttagtagagacagggtttctccatgttggccaggctggtcttgaactcctgacctcaggtgatctgcctgcctcggcctcccaagatgctaggattacaggtgtgagcccctgtgcctggcctgaaactttcaaggtctcaagacactgtacatttaaagtaccccaatgttttccttttccacctcccgttctttctccttatctaacatgaagaacattgtattaaatctgatttttaaggagtttttgtctgttatgtgttaagggtttgtttggtaccccaatgaaaacattctgcattgcagaccaaagtgtgcttatttcaggggcatgggatcattgcgttcttagccattgtcacaaaatacatggagtcatatttaaaatgtaaagttgtaacatacatatgtttaaaatggaaatacaaagcaaaaagatggatgtacaatgtcatgtgtattcagttctctgtacttagtaaatgtaacaaactttctgtctattactgaactataggtgcaaggacacgtctccagttactttgcatctgtaatccacaaagattctgggcagctgtattatcatagcttggtttaaataaactatgtagtaacaatgaacaacaagaacaaaagaaataatagcttgcctgaggtcacagagccagcagatcttataggtggtgcgtcatttatatgaggaatgtgtatctaggagatactgtttggcgttggctaagggtggaatgaatcatgtatgtaatagattatgcaatttacagtgatgagtggatagatttacttatggggtaggttataatgtggtgggatgtgaatctagaatgtgcctcctaggcagtcatgcagattgtgcatttggtaagtcaggtatgtcatgattcatgtatctaatagctcttcatttgcagtgtccacctagtagctcttggatataacgggtcatggctgtggcatggtgtggttgatcttggttgatcgtagaccttatttaattgaatctaagatgtcatctatggaaaaatgcattgttatttttgttgccaatgaaattctgacatgacattgatcacattccccgttaagcaatgtggaactgtgcctcagagtggaagaggccatgtattcctggattgtgtggggagtagctgtgcctgtggcctgccataggtgccaggcaggtggcagaggcctgggctcagcccttggaggctcctcccggagctgccctccacatctcttctgtgtttaccccttggtcggatcttctgtttcttcccacctctgcactgcccccaaggccggtggagccaggtcagatactcctgaggtaggcatgggaggaacccgccggtatttggtctctttcagccccttatcaagtctcatagtgtgggttgcagggggctgcctcttgctccctccctcagagtcttgtcctggctaacagaaaactgagccaggatcatctttctattttacagagggagaaattgaagccctgagaagagacgatgtaaataaagttatcggaatagtgactgagctagttcctaaccccaggtctcctgacatcaaatctagcctctcttgtcctccacaacagttgctccctctcccctttccctacaggcaatagcactccccagtcatctcagcttcagaggtcagatcaagtggacagaataaagctaagcagggcagagaaagggcttctagcagtggaaagaacatgaagatgcctcctcataccactcgaacacacatgccctgactcccgatttgctcactcattaatccacccacacattcactcattcactcactcattaattcacccacccattcactcattaattcacccacccatttgctcacttactcagtaatttaccctcattcgttcattcactcactcattcatgcattcactcaactcactcattaattctccctgtctctaattcactcactcctaattcacccactcatcaattcccccacacactcactcattaattggtgctcccactaattcgcccactcttgctcacaggtgtcaccgaggccctccaacctgcccttccagccagcagtggaggacaggctcccaggcctcccaagtctcaggcttttcttcctctgccctcactctctgccttctacatcaagactttacttccccagattgattggcagcccttgaaaatgtctgcacagaaggcaatgagggctggagggagtgagaagaacagagtgcaccatgagcttcagacagccaggaccagctgtgtaattttcagggccccgtccaaaacaaaaatgcacaatcccttgttcaaaagtcatgatgaattttaggacaaccacagcagagcactgaaccaggaaccaggactttctaagggttgggttgcctgtgactgcactggcgatacccccacaaagcccactctgaaggtaggagacgggtggagagaaacagggggatggcaagggggatacgaaacagggagagggaggagggggaagaggatggacgtctaccaggccccacttggtgcttgatttatgccatctcatttccttctcaaaccaccctttgaagttgattgtacattttacagaaaaggaaactgaggctcggagaggagaatcatttacccaaggtcccagttagtagacggtaggtgcctgaatgtaaatccaggtctctgcctgctccgggagggggtgggggtgagggaaacaggagaatgtgatgggaaaatccgagatggagccagcctgggccagaaacactgggagctgtgggagacggagaggggcagggtgggatcacagggagcaggagcggggaattggaggtgaatctggccctcccaaacttccagtccattctgctcccaggggaaccgggaaactgcgggggaactggaagggagctcccagaacaaggatccagaagattggcatctggggcctgggatttaggtttctaaatcgtgggccatggggcagccttatctctgcaaaagcattgagggtagaagtcaatgatttgggaagttattgaattaggggatctcggaggtaggctgtcagtgcctgatagtatcagttagaatgcctgacttggggtgacaatggcttggaggggtgggtgagtcaagggtcaaatgagtgcccgtgagtcatgatgcctgccttgtacaattgataactgaacatcggtgagttagggccccagcagttgtaattagcaccccgggtgtcagccagaaaccaacaaacagccaaatccctgcagccccgcccagcctatccaccggcgggggaccgattaaccattaacccccacccctccccggcagagcctccaccccttcacagaggctaggccaagactcccagcagatcttcccagaggacggtttgaaaggaaggcagagagggcactgggaggaggcagtgggagggcggagggcgggggccttcggggtgggcgcccagggtagggcaggtggccgcggcgtggaggcagggagaatgcgactctccaaaaccctcgtcgacatggacatggccgactacagtgctgcactggacccagcctacaccaccctggaatttgagaatgtgcaggtgttgacgatgggcaatggtaggtgggggcagatgtgcccaggtgtgccagtgggggcaggtgtgcctgggtccaggagcagatctttggcactcaactttggggtgggaggagaatgatacaaaatggtaggttggtcctacaggccagcacaggtgttgccaagtgaagcccatgtgcccaggcacagtgatcacaggcattctgggtgaagggaggcctgcaagggccaatttccagcaaaagtcgatcccggctattcctcccaggcccttccagtcctcactgcctcacagtggctctgcttggcgcttggcacagtgacgtgatggtgagctcccccttggtgcccagctccagcgattcagcccagcacggccccttcgtgaaccccttgggcctaggttcagagagacggcaagggatgttgtatccctggagatggtggttggagacataaccgcatttctcggtgtctttgggactttcctagggaaatgaaattggcacttagggaaaatggagctctcagggaagttttgctaactacgaagccaactcagcactgtgtgtgttgtgtgtgcgttcgtgtgtgatagtgagtttccatgtaggttgtatgggtggggtgatgccttcaggaacccatttgcatatgtgtgttcatttgtctctgtgtgtgagttctgggtctattttcctttgtattcattgagtgggtctgtgtttgtgtcttaggagttgcccgtgttgatcttgcttatgtatgtaagtgtgtatgtgtgtgtacttgtgtctgtggatgtttgtacatgtgtgctgtgtgtgcgggtcatagagcacatgcgtttgtgcatgcggacctgttggagtgccctgttcttcctgcatctttatcctgtatgggcgttttgtcgtgtgcccatatttgtacctgctgtgtatatatgcagttccctgtgctgcgggcgggggtcagcggtctctggtgtgcacgactgcacagacccaaatgcaggactctgttgttgccactcaccaagtgagattcatatcagcaacatgtccgtttgtctctgagcagattttgttgccgctgcgtctcgccagattgaggcatcccctccgacatcactggagcatatctggaggggtggacagttctccacagggaggtaggggaaaagaggaggcccggaaacccctcctggagggaagagccccatcggtcccaggccagcctcagaggagagggggcaggcagctggctgaggtcagcctgccaccctgcttccttctgtgtcttggagccactcagccagtatgaggctgcagctccagctgaggtctggaatcttgtggtcagctcagctagggtgaggaggcagctgctgggcactgcttgttgtcagctcagcaggtgctcacctgcccctgccgtccagtcacgtgtgaccttgggcatgtcacctcccctatcctggcttctgtatcttctacaaaacaggcttcattcccccaggcctgctggctggacggcttttaggcctgtctgaggaccacgccaggagcgcaaggcaaaaacacaccagagatagcaaacaagctgctgctgcactaggtggagtgttgtgtggccccacgaggaccactgccctgccctgggctgctccccgcccccatcactttttccaagcccaggaactgtgtgctcctgaggcagaggccaagcccctgaactgggagtcccaaagacaagaccacctccagctctggaaccagaaagatctgggctcaaatccggcatagatccttccaacctgtgtgaatgtggcaaggcaatttcctctctgagcctcagtttcctcacctataaaatgggaataaataatagtgtctgtctcccagggctggccagaggataaataagatgaggtgcctgggtgcttagccctggtaaagggcctggccccaccatgggtcatctcaagggctctgagcatctgtaagcagggtccccacattcctcactggagtttgaagtggtctgaattggggttatgtgaagttgtcctctgaagtgttttgagtacatcctgggctggtgtctgaaaggctccaaggatatttctcccccgtcctctccccaccccaatggagcagcagccctgggtggctccttgttcattagaggcccagcagacacctcaacatgtgtggcactggctggagtagcccagcaagcctggaccataaacccatggctctgcttcacgggaagcagtgcgatgacaccaggaagccacttttcctctctaagcctcagtgtcctcatctgtggaatagaggtgctcggctgacctcagaggggagatgatagagctgacagcccccagcccatcctgcctcagaggtgggagctacttccccagcctcctgctgaatggccaggagctgtgggggtcagctctccccgggggtcgggggaggagaggccgagggagaaagggcacccacgtggcttaacaattatccccatctccaggaataattcaccaagtggagggggctgcactcctggggacacctgggagtctgcgatggcagaaatgagatgcggcagtgtctgcttgtgcaaggagcctggaagtcctctgctccgagagttttcctatgtggaaaagtttttatttcatgaacactgatatagtgcttactatgtgccaagcacttcacatacacatatgagaattcaccgaatccccataacgaacctaggggaatatcacgttccccattttacaagtgaggaaacaaaagcatagagaagtaaacgaacacagtcaatgtcacacggctaaaaagtgggcaagctggaattgaaccctgggcagaaggacttcagaggctgtgctgttacctacagtgcatggccctctctgggtcttaactggatgcccctgaggaatccaaggttggattcaggatttctatgaatacacgtgtgtgtgtgtgtgtctgtgtatgtgtgtatgtttgtgcatgtgagcatgtgtgtgtggactgtgtgtatgtgtatgtatatgtgtggactgtatgtgtgcacacatttgtatatgtgtgtgttgatgtgtttgtatgtatgcatgtgtgtggactatgtgcaagtgtgtgcaatgtatgtggactgtgtgcatgtgtggactgtgtgtatgtgtgtgcatgtgtgtggagcgtgtgtgtgcttatgtgtggactctgtgttcatgtgtgtgtactgtatgtgtacacatgtgtgtatatatgtgtgtgtgtgcgtgtgtctgtgtggtgtgtggactgtgtggtgtgtgtgaactgtggtgtgtgtgtgcgtgactgtgtggtgtgtgtgcgcgtgtgtgtgactgcttggtgtgtgtgaactgtggtgtgtgtggtgtgtgtgtgcttgtgtgtggtgtgtgtgcgtgtgtgggaactgtgtggtgtgtgtggactgtggtgtgtaaggtgtgtgtgtgcttgtgtgtggtgtgtgcgtgtgtgtggactgtgtggtgcgtgtgtgtgcttgtgtgtggactgtgtggtgcgtgtgtgtggactgtgtggtgcgtgtgtgtgcttgtgcgtagcgtgtgtgcgtgtgtgtggactgtgtggcacacacgcttgcattttcccgggggctgacccattgcatttgtcatcttcttcaaaggggtctatctttgctgaaagatttgctgacaaataaagggggttcagctgctgctatttttttaaatttggaaacaaattttttaaattttttaaattttttaaatttggaaacagaccagtcaaactgctgccttttatggttagagaaaatgaggcccagaagaaattgaagcagggaaagcgaagttgcccaagtttacaggcgagttagtggcagcatcagcagtagtgcccaggactcctggcacccagcccaagatcctctttccacctgcctctacggcccccctcacatttgtgtagatgcagtagcttttgcctgtgggatgggagggatgggagatgtgtccagaccctcctaggaggccacatgagtgtgactgttctcggcccaagtctttctcgttcctcagagaatttgcggggcccctgggcacacaagctgagatccacccagccctggtcccttggcaagaactgagggacaggacctggttctggggaaaatgcaggggaatgtttctcccttccacagcccccttgcgagttaggaggccggctcccaccccagaaggtggccaggttttcatgccttcctagagaaagctggggctcgtggcctccaccacaggaagacgcagaccctcagaaacaagtctgtgaagtcacaaccagccccagtttacagatgtgaaactgaagctccaaaaagtcaggaggtcactgagtggggaggtgatggagtgggaacagcccccagatctggctgaggccgaagccctggagagatccccgcaaggctcccttagatgcctgacattctgttcttcctgaagcctcactcccttctctcctggcgcagacacgtccccatcagaaggcaccaacctcaacgcgcccaacagcctgggtgtcagcgccctgtgtgccatctgcggggaccgggccacgggcaaacactacggtgcctcgagctgtgacggctgcaagggcttcttccggaggagcgtgcggaagaaccacatgtactcctgcaggtgaggagcctcaatttcttcagctgggaaatgggcacacttgggctcatggccccaaggtctgtcttctccctgagtgggtaggtcccagagacagctgcccttcagggccttcaaggctcttctggttttgtaaaagactttgtgaatccaagaagagcatctattctaggaaccacatttactgatcatcaagctactggctgccgtttattgagctcttatcatatgccaggcacaatactaagtctttgtgtgtatttacccatccccttgagcccattgttgtttttcccattccatggggcctctcctgaagcctcagtagatgagcccgtcttccagtctggtgctgtttttgggacaaataggagattgaccccaggccgttccacctaccccaggggcttccaccaaccccaaagtcttcccaaggccttggagagccctctttcgaaagcatctcctgttctgggtaatgacaataataaaatcatagcagctgtcaattgcgagcacttgtcatgtacaaagactgtgccccatcggcgcatgacttcatttcacctgtcaacacccctgtgagatggttactgttgttattcccattttatagaggaggaagctgtggcttggagggctaggcatttgcccaaggtcaaccagcttgaatcactggcagagccagggttaacattcagggccccacccatcaccacggtgtggcactgcctctacttcctatccccctccagagagaggcttatgtgaaccgagtattaactctgagccataaccaggagcctgctatgggttctgagcttttataggatgtggtggaaatagcagggctctggtactccagaggtcaaggttcccaactcagctctaacaccaaccagcagagcgacccaggaccacatgttgcctctctgagcctcagttttcccatgtttagcaggacaggactgggctcttagagagttcatagcacctttccagctcctggtgggttcaagagagaactcccgggatgaagagatgagagcactgaggttggggggtcaactggatagccagggccctagttctgtcctaagaggaggaagttgtgtcttctccatccaaccatccaaagccctccccagatttagccggcagtgcgtggtggacaaagacaagaggaaccagtgccgctactgcaggctcaagaaatgcttccgggctggcatgaagaaggaaggtgagcctcggccctccccgccccaccaccactgccccacctgcacccacagctccccgacagtcatttacaactgtagccacactttatgactcagtggcaggccccagggtgactggctaatggctgagaagagggagggcctggaaatctgaccatagggagcggctgggcttggtcttgagaaagattcagagagataagctcccactcttggctcctcaggctcccagcaaccaccacccctgcctgcctgtctgcgccaccacaaagcagccacgttgtgtgtgtgtgtgtgtgtgtgtgtgtgtgtgtgtttaatataatatttcgaacgttaggacaagcatagagaatgatattgcaaacatctgagtactcactatcccaactttacaaaagggacagccagaggagcccgatgcctgagcttccggtcccagggacaaatgccccagttcccttagtattcattcgtgggtatcacgtgatctccaaagtcttcacattctagaaaatgggaacaagaccccagacccatcctggacaaaggaggagaagaccagagcacaacatttattaaggtcttgccaggcttcctgctaccagcaggtatcagtcactgggctgtgctttttccacacttcagtaggttgggttcatttcattttcatgacaaccctatatgggaaaatgttgtgaaaatgaaatgagcccagcccattgaacctattacaattcctccctttttgtggatgaaggaactgaggcccacaatggttaagcaacttgcctagggccccacaactgatccttggaagatctgaagtcccagagcttctgctatttggaccacacttcagcactgtctattattttatgctctccagataccagggacatttaaaattgttttcagcccaagcaagggaagcaaaaatcttttaactgctttaaagtaacttgaggccaggcgcagtgaatcaggcctgtaatcccagcactttgggaggccgaggcaggcaaatcatttgaggtcaagagttcgagaccatcctgaccaacatggtaaaaccccgtctctactaaaaatacaaaaaaattagctgggcgtggtggtgcatgcctgtagtcctagctactcggaaggctgaggcaggagaattgcttgaacccaagaggaggcggttgcagtgagctgagatcatgccactgcactccagactgggcaagacagcgagactctctcaaaaaaaataaaaaagtaacgagttcattttcgaatctcttcatttcctgctcctctaaactcaacctttcccagctctgcgactagtcccagaccttcccttctagcccacagttgtgccgtaccagccaaaccttggtctagtcctgctagttcggtacaaacacccctcacccccatcaccccagcacaccccagaagcaggaacgtaggacccagcttgctccagggcccactgagaaggaggggaggggaggctttggtagactctctttcccctgtatctgctcctggccccctgttttctctgccccctcccttggaaatatcttctatgtctcatccttatgggaccttagtctgggctcatgagctgtcttggaaaatctgggcttgctgatcccgatgcaggagtgggtggtccccaaggcctgctctgaacgctgcaattctaacatctagatatcagtggttctccaagggcaagaggggctttttaagctgcaaatactccctcctctcccaaacccagttttcaatggggttaagcctgtctcatccacttcaacttccattttgtggactgggaaagattatgaatgggaacctgatgcatgtgtgaacagttggaggcaagaaaaagattgagaactacagtctaaggttccaacatttctgtggttgtattagtcagtgattccattatcccaaaagcctaagattttaggcactatgattcctcataggtgtcatccagagggcactgtgtttgagagaacagctctctcacagtgaaagttcaggtctgtgacaggcagatgggagaggggttggcagccctcctgagtggatggctacccacctccactgcgtgtggcctggtcctgcgtgtggtcagttgttataaatgtcttttattagacatccagagtcattttcacttgtgtaatttagggacatttctgtctcttctgggctctagttttcccatctataaaatgaggacattggataatgaacccttcagccctatgagtctcgctcctcactccctgacctacctgcacaagtcacactgcccactaggatgggtgtgtttgttccctggtcccttcttttttttttttttttagatggaatttcgctcttgttgcccaggctggagtgcaatggcagtatctcggctcactgcaacctccacctcctgggtgtgagtgattctcctgcctcagcctcccaagtagctgggattacaggcatgtgccaccacacctggctaattttgtatttttagtagagacagggtttcaccatattggccaggctggtctggaacccctgacctcaggtgatccgcctcggcctcccaaagtgctgggattataggcatgagccactgcgcccggcccctggccctttcttgagctgctgcaaagccagcaaaccccttactaggctcctggaagggggatgagagccccagaccattcagccttagctcagccttgaaaatagctgcttgcttcctggcccagggaaacggacatgctgcccggaggataggagagttggctgatggcgagtgagcgtgggttagtcgatgctagtgtttgtttacatgcctgggttacctggaagatcatgacacatgcagtcacttggttgttttgagaacgggccagagtgacaaagtgttcagttgccactgtggtcaagccataggaaatgagggtattcctagctgtgcctgtcttctaggccccaccacccctcctcagcctgctgggaagctcccaaagccaaaagaaagtctcggtggaagtctcactggccaggagagttgggacaagtttttatttctttttcttgatgaccttaggagaatttgaggactgaaaccctaaaatagtccctgagaaccagaaagtgtgagctggaaaggtaggatttcaagaccagctgagtctataagaggtcatcaaatctacctgctccccactttacagaagaggacactgaggctagagaggtgatgtgacgggtcaggggtggagtcaggtctagaactcaggctccccagagctgagcagacaccaagctccctggagtgaaacttgcagtgatcagcttgggaggcacatttcttgatctagatggctgaaactttctctcgaccacagagaggggcttcaggtctcatgggcctataagtctctgccacaggatagtccaccatggctggaaggggctccctggaaggccaaagaatccagggagaaccctgggggtcagtgggccaacagcaggtcaagaattctttcctgcaaccgaaagccagggagacagacacctgccttggcctaagctgtcaggcccaggacaaatattcggctcctggcatcaaaaacccagcccagaaagcggacccagagttgcaggaggtgagcgtaggtgatgggccaggggccatctgaagaggccttcctcggaagcccctgccctgctccccacagccccctacccaggagttccctgggaagacaggctcatcacctctccgcctctgcccaggtcggttaatattcaatagaagttacattaggtccccgaccctgctaatactgagcaaacatttggaaaacatcattccgtgactgagctcgcgccgggcactgataacgcccgcctaaccttgaggagccctatccgcagctgctgacagcagccctttcattccgcccgccggccactcggcgccctgatgggtgggtgcgggtgctggcaggaggctgccgtgggaggggtgtgggcgggtggggtggacggcccggtcagggaagccgtgctctgagctggccccgtccacatggtggtctgagaggaggttgcttgcctctggacttctgttctatccactgactcccgggctcaagtgcaaaggatttgacttttattctctgattttaacaatgtgtcaacatcaagagaaagttgaatagctggggtgtcaatgttccctggagaaatagggttcttataagaattagagtttatgaccaggtgtggtgcctcgcacctgtaatcccagcattttgtgaggctgagtggatcacttaaagccaggttttcgagaccagcctgggcaacctaatgagaccccgtctctcaaaaaaaaaaaaaaatttagccaggcgtggtggcacacgcctataatcccagctattcgggaggctgaggcaggaggatcgcttgagcccaggaggttgaggctgcagtgagctatgattgcaccactgcagtccagcctgggcaacaaaatgagaccccatctcgaaaaaaaaaaagaaaaagaattagagcttgtctcttccaatgccttcgttctctcactgcacaaatattcattgagtacctactgtgaaccaggccctgttctggtggctgggactacagcagtgaactagagggatggagttttggccttctgaagctttccttctcagagagagacagatagtaaaggaagtaacaaataattctacaataagtgacttgaagaaaaataaagcatggggggcagggccagggtgggagtcatgttgtgttagacagggtggctggagagggtgtctgaaaggcgacatttgtgcagaggcaggagtgaaatgaagatgctgctgcgctgtgcaggaaagggaaccccaggcagtgaccacagcagcctacaagcgtgcggatgcgtccaggtggggaggcgggttttcgcggacagagtgtgtagggggaagccggtaaaaggtgcgatccgagaggagaggaagggccctggggacttgtgaggttggaaggcactggttttgagcagcaggcgacatgacttgaacggatccctctgtctctgagaggaacacagactgcaggcgcaaggcagaagcagagcccaggaggaggctgatctaatccaggagagacagcgggcctgggagcagggagggagcagcaggtctgtttgtcaggatcacgacagcactggggtgtgaggggaagccaaggaaggtggccaggcttgatgccagtccctgagacgagaaagagtgcagggagccggctggcagggaaatgcctacgggtagggaaactgagccccagagagaggctgcgattgccaccggcacacagagtggcaggttccagacaggaagccgggtctggtgcagcttcaacctccctcctttctgaatcagccaagcctcattccacagtgaggcctcttggactccaagggctatcccatccactgtcgggatggtggaaggatcatcttctatctcaggccaggactgacccagatgggagcaggcagtggagcctggggccccggtgggcgtaggctccagatccctcagtgcctggaacagagcagcagtgggagggagggagacagcgcctggccttgctgatgctgaggttagtctggagtacatgcagctcctgctgatggacaaaaccatcaaggcagttggagcccccagatcctcttgttcaggaatccccaggccatctccttgtcacccagagtaatttgttttgcttgctttactcactttcatttggaaagaaagggacccttttgtagaccagagcttgaacatctttaagctagtcagatcccctcctcaatgctcaagaccaattttaaacccatagccgagtcttcactgtcttgcgcgcccctgctgatgggtggatcactcttatagcctctccattgtgttgggggcagttgtgatatgtggaaagttcttccaccagctgagttagaggccatctcccctcattccacatgctgatgtgggcctgttctctggacaccccccacctcctgctcccactcctcatcagtcacagacacccccaccccctactccatccctgttctccctcctcacctctctgtgcctcctcacagccgtccagaatgagcgggaccggatcagcactcgaaggtcaagctatgaggacagcagcctgccctccatcaatgcgctcctgcaggcggaggtcctgtcccgacaggtaccggggtgatcctgccacccacccagggatcccccacactacagaggagctcacctcctccacctccattctccccagccaggccctggagcagctgacgggaggggcctcagatattacagaagggacactgagtccggtttcacatggcccagtttgcagcaagggcaggaatcgaacctggcgccctggggcactttctaattcatcctactgcctgcatcccacaggccaagcagagtcttcaccttcactgagggcctgcgatcagctcagctccgagagaacagagcagtggctcagtggagagaggtggcaaagtggggcccagcccttcccttgctgagtgaccttgggcaagtcacagcacctctctgagccatggttgcctcattgtcagaaaaggatgatgattttttgccctgcttctcctctaaggctgacagactccttggggctctaaagctgacagaggagggggcagggggcaggtaacaggtgaaggcacagagggagcccttctccctcatccctgcctcctccctccctccgtttttaccctgagcttccttcagagctggagggcacccactatccagccccctccccacatctgattccagggagggggctctgtgcaggggacagagagtgcgggagggcccggacatctccagcattttcttccctgtatctctcgaagatcacctcccccgtctccgggatcaacggcgacattcgggcgaagaagattgccagcatcgcagatgtgtgtgagtccatgaaggagcagctgctggttctcgttgagtgggccaagtacatcccagctttctgcgagctccccctggacgaccaggtgaggatgggcgtggatggtgggcagtagtgggcagtgggcggggcagccagggggctgctggcccacctgggatatagccgtggactggcttgattttattttatttaacaaaatatgtagtgcacacacgtgtctgaaactttaaatcaccttacaaatattaactcagttagctcctccaacaactctatgaggtaggtactaaggtactattattactgccatctcataggtgaggagattggggcacagagaggttaagtaacctgctcaaggtcacatagctactatccagcatagctgggattagaacctggcaggaagctccaaagtccaagctcctgaccattgtacctgaggctctcccagggggatgttgacagggaccctaggacagggatcaggagattttggcttaagctatggctctaagactggttgtctgcctaatcctgggcaaatgagttcctctctctgagcctcagtgttctcttatctgtaaagtggaaatgataatatccactttagagtgtggttgggaggattgaggacattggtgtctgaaaagtacaaaaatcaggtgatggggcaagctgcacagtggccagaccagagctggtctccctaaacattagtttcttccttgtttcccaccaaaacgattgaactcagcatcgtgtttcccaccaaaacaattgaactgagcatcatatttcccaccgtacatttttttggaatactgaaatgtccctagggggaagaaagggttgaaggaaggtggcgtgtgtctgaggacagatgaatttcggagatgccacctatgaagctcctgcccagagcacccctgggcctccaaagagatgttacccatctggggaagaggagctgggctgggccaccttctcagcttcggagacagactctggtgcattcgcttacccgtttcgcacctttgcataagacactgacaatgcatgtgagtctgtgaaagcttctgagaagtctcgtccaggcagttgtttgactttgcagaggccgaggcttctcaaactccttcggcaagattctcctggaacacctattaatactgcacattgggacactgtgaaaacgctggtttggcttgtccccagcctcatacaggggctggacccggggccctcttccatggttcctccttccattagcagagtcgacagggcaaggatcttggacaatccgcccctaccctctcccctgttccttgtgctctggccccagtcccctctgctggagtctctacattaatgtttaatccctcctgttccttcccaggggcttagcagggcaacaagatacccccaacctgagcaattgttaacctcgatttcccacccaaacctccctggctggggctcagagcattctcagagagcaatgatgggtggccaataacacaggacaatcattaacacaccaccccgacctcccggcccaccccccagaacagctgccatatcagggggttgaacctgggatcagaagggttcccagctccccattcctggtatatgaggagcccagcttgcccaatgcaggtggggcatccctgggaaagtcgggggcattgtcctccaaagggcttcccaattttgttgacattgccccagaaactagattcccagttggtgtgcttcttgggcctggatacaattgcagaaagagattggggcttagagagagacagaaatttgcctgaagtcacagagcaagttagcgacagaactgggattcaaatccaggtcttccgcttcgcgatgtgaaggccactggagtgactgatgaaagacttgcacagtgcccagtgcgcaggaggcgcttggcaatcagcatcctcggcctccctccatactggtcatggaaagtggattttccctcccaggcagtttcctctttttctgttttcctcacaggtttctatccatggggaatagaaggggcaaggacaagtggctgcccaggagcagctagagctagagaggaagtcaagatgtttgctcattcattcattcatttcccctttccttccttcattcaaatatttattgaaggcttattttgtgccaaatatcttcagacaaatgccttctttcctctaacaacaatttcacctccttagaggccttctctgacctccccatctaacgtagccattcttgccccattgctctcaccatcctttccactcccctccctccctccttcccttcctcccaccttttctccttccttctttcctttatgctgtgatcaccctgtgtcctctgtacttatttgttctctactatctgttcatcctctctcctataaatgttagttcgatgagattagagaccttgtctctcgtttttaaacattgtgcctccattgtcttaaaaagtgtctggcatttagtaggcatttaggatttgataactgaaagaatgaacaatcaaattaatgaacaaacaaaggattttaaccttctagtttggcttgctatggaacctccaaactccctaacccaaccttgaagatgagaagatgagatccttgaggctaccagcctggtgctgttttgtttcaagccatcctttggtcctcaggcaagcactaaagcagatggctctcagtgggctggctatgtccttctgtgagcttgctgggcccctacctatgactccagtcttagaagtcttgccttgtaccccctgcagagaatggtttcatcaagctgattctctgccaggggccagtgctcatacatttgctctgagaaggaccagccctgagacctaacatccacatccaagttcttgtaatgccctctcagaatcctggagtcctgcaatgtcgatccctggagggatctgccagaccaatgatttcccaaacagaattgcacttcagagtcaactatggagctttttaaacacagatccctgggcccaccctaaacatacaaaatcaggatcagaatctcagggcctaagaatctgtattttcaggccgggcgcagtggttcacacctgtaatctcagcactttgggaggctgagttgggctgatcacctgaggtcaggagttcgagatcagcctggcaatatggtgaaaccccgtctctactaaaaataaaattagccaggcatggtggtgcacgcctgtagtctcagctactctggaggctgaggcacgagaatcacttgaacctgggaggcggaagctgcagtgagccgagatcatgccactgcactccagcctgggtgacagagtgagactctgtctcaaaaaaaaaaaaaaaaatagaatctgtatttttacaaagcacccttcataattctccatagctggtccatgggtgggaatttgggacccacagttttggaactttttgggatcatagacctttttgagaatctcaaaaaagaaaaaaaaagcacacagaatgttgcttacagtttcatcaggcacacagaagaggcccagcacgaagcagtttcttgcccaaggacacagcagttcaaggacagagtcagcgcgaggtctctcagctctgagcacatgttctttccccttccaggtttctagttttatgggtagtagttttatgatgcccatttcacagttcaggcaggtagaggcagaggggagcattaagctgacttgcccagcgtcactgagttggctacgggcagccttcccaagggtacagatggcaaacactgttccttctctctttcaggtggccctgctcagagcccatgctggcgagcacctgctgctcggagccaccaagagatccatggtgttcaaggacgtgctgctcctaggtgaggcggctgcctgccctggccagggctccagggagggtatgcctagcatggcactcacccaggcaaggagattcacatggtggcatgcaagggtgagggagactagtcaggagtggccctgtcctcaggcttgcattagagggctccaggactcagttttcaactgggtaccccactcagatgcaaggaaatgtggatgcaagtcaccaaattcccagcattgaagtcagagcacgatcagggttatccctggaattacctgtgcatccttttttcttttgacagagtcttgctctgtcactcaggctggagtgcaatgatgtgatctcggctcacttcagcctccacccgccacgttcaagcaattctcctgcctcaccctccagagttgctgggaccacaggcgtgcaccaccacacccagctaatttttgtatttttagtagagacagggtttcaccatgttgaccaggctggtctcaaactcctggcctcaaataatccacccgcctcagtctcccaaagtgctgggattacaggtgtgagccaccgcgcctggcctacctgtgcattctgatgttctttctggagtaggagcaagaggtggttaagaatggcacaaagccccagcccgcgtcacctgtgccttcatggcatagttattattttaaacgcttgtacagcacacactgtgtgccagggactgtgctcactgctttgcaaacactacctattttaatataacaatgctatgagggaagctcgattatttatcctcatcttatagataagaaaactgaggcacagagaggttaagtaacttatccaactataaccagctatcaggggcagagccatttaagcagggcagtgcagttccagaatctggtcctttaaccttgatgctttggtgcctatcaggtgacctttgaatgtcatcgatcttgtgagtcatgttggtaaatggagcttgggtcatgtgaaagaggtcctagaaagccaagttccaagctcagccggatgactcaaggcagcttatcttctgaatctgggcctcagcttccttacctgtgaaatgggagtcaccatccctgcaggtcctcctcccacaggcaccagctatcttgccaacttaaaagccaaaactagaggagaggggtcaacccaaggtgacttcccatcctccctccctcccaacccttccaggcaatgactacattgtccctcggcactgcccggagctggcggagatgagccgggtgtccatacgcatccttgacgagctggtgctgcccttccaggagctgcagatcgatgacaatgagtatgcctacctcaaagccatcatcttctttgacccaggtacagtgcacacctcctaagccatccctgactctctctccagaacgctctgccagacttctcctattgggttctgtacactgagttcacagcctcatctcatgttaacgacagccaggagaggccgttttcatttaacagatgaggcaagtcaagatttgaagagacaatatggccgggcgcagtggctcacacctgtaatcccagcactttgggaggctgaggcgggcggatcacctgaggtcaggggttcaagatgagcctggctaacatggagaaaccccatctctactaaaaatacaaaaattagccaggcatggtggtgcacgcctgtaatcccagctattcgggaggctgaggcaggagaattgcttgaacctgggaggcggaggttgcagtgagccaagatcccgccactgcattccagcctgggtgactccatctcaaaaaaacaaaaacaaagggaggatatgacttgacagggcaccctgactccaaaggcctgggctttcccttcttttacttcttccctccatccttctttctctttacttcccatcttcctcttttctttcatatttgcttcttttcctcaaaaaaatttatcaaaataatatctagaaccggatgtggtggctcacatctgtaatcccagcactttgggaggcagaggcaggaggatcacttcaggccaggagttcgaggccagcctggccaacataacaagacctcgtctctatagaaactaaaaaaaattagccagggatagtggtgagcacctgcagtcccagctactcgggaagccaaggtgagcacctgcagtcccagctactcaggaggccaaggtgggaggatctcttgagcccaggaggtggaggctgctgtgagatgtgattgcaccactgcactccagtctgggtgacaaagcaagacctcatctaaaaaataataataaataaataaataaatctacacatacttaaaatgcaaatacttctccccatcctacttttccagctctaagtctactccccaagagaagcatgtctgattattttaattgtttcttctggcagtttcctcaacaattctaaatgaaagacaaagccttatatttgttgatgcatccattttggatcataatgttcctcctaggatggcagaggattttgcttttctccatcaccattcccatcttttcttccccatttttcccaatatatttttattgctatttttgagtctctgttgcaagttatgtgcttttatctttcctttcttgttctatcaactgtagacggtatctcccaacccttcacattgcaggatgaagaaaaagcattcctaccctctcctgtggctcttggctctcctctccccattctgtccactgacttttgcacctgcatttatacagaatgcatttgtcatcagtctttgtacaaaacttgcttttgtttcccagcatcaaaggtgcctgaactctggaggcttgcttgccttccctgcttacatgttagaggggacctactgtgtgccaggcactgtccttcacgctgcaaatagattacctctagtaataatagtaatgaaaaggctgggtgtggtggctcacgcctgtaatcccagcactttgggagactgaggcaggcagattacttgacgtcaggagttcaagaccagcctggccaacatggtgaaaccccgtctctactaaaaatacaaaaatcagttgtgtgtggtggtccgtgcctgtaatcccagctactcaggaggctgaggcaggagaatcgcttgaacctgggaggcgggggttgcagtgagccaagatcatgccattgcactccagcctgggcaacaagagcaaaacttcatctcaaaaaaatacatatatgtgtatatatatataatatatattatatatatataatatatagtgatatatatagtatatagtgatatattacgtataatatatattatatatagtgatatatattttatatatatatagtgatatatattatatatagagagagtgatgaagtggaagatgagccccatgtattgaatgctccctaaagagctgtttttaaacactttatgtggattgtcttacttaccaacatggtacctgtgaagtaggaattattattatctccattttacagataaggaaactgaggcatgattaacttgctcaaggtcacacaaccggaaaatggcagagcttggatttgaacttcagaccacctgtcaatcccaatttctctctctcaagcccacattcttacctaccacctgctatcccacacttaccagagggtgagatttctagttctagttccctccacagcctggcccagcctgtatcctctgtagtgctcaacacgaggctggactggcagaattgttctgcaaaatgggaaggatcactgatgctgagtcagaggcagcagcctccagcaatttgaaggggcgggggacctagttcaaggcctggcatgcaggaggtgctcaataaacatgtgtggcctgaatgaactaatgaataagcatgattcagtggagacagcccactagaaatgtgggtgaatgttctttctgccacttcctttgtccatgaaagaggaaataaatgcattacctccatgaaggttgagattaaatattgtatgaccgcttaagttcctttctaggctaaggatctagaatttattcactgatttttttttcattcattcatccagccatctaacaaaaaatatacatatagttatcaataaatatatatttatatataaatatatattttttaaaatatatatatatatagtctgtcacccaggctggagtgcagtggcaccgtcttggctcactgcgacctccacctcccagtttcaagcgattctcccacctcacctcctgagtcgctgggattacaggcatgtgtcaccacgccaggtgaatttttgtattatcagtagagatggggtttcaccatattgaccaggctggtctcaaactcctgacctcaagtgatccccccgcctcggcctctgacagtgctgggcttacaggcatgagccaccatgcctggccctattcaataaatattgactatgcatggtgctaggtggtgagtttgaaaaggcaaaggccgggtgcagtggctcacgcctgtaatcccaacattttgggaggctgaggcaggcagattacttgaggtcagaagtttgagatgagcctgaccagcatggtgaaaccccgtctctactaaaatacaaaaattagctgggtgtggtggtgtgtgcctgtaatcccagctactcgggaggctgaggcaggagaatcgcttgaacccaggaggcagaggttgcggtgagccgagatcacgccactgcactccaggctgggggtcagagggagactcagtctcaaaataaaataaaataaaataaaaatggcaaataagacatacgcgtgcccctgccaaactcacagttggatggcacaacaattacatcctgtgtggtcagcagtgatggaggggccgcagagatttggaaacaggagggacacaggatacagatataggagggtagaaggcagacttcctggaggaggtgaaacctaacctgagtccctaaggtgataggaagcaggaaccagggaaggggagcctattctaacacagtagaagcagcaactgctgaggtctggatgaggggacctcaactgtggcccaaaaccccaagttcccattgtggctctgccaacaactggctgtgcgacccaggacaagtcctatctttgcactgtgtctgggtttccccgtgtgtaagatgaggcggttgctaggtgcttattggatgcattcctcaagtcccgccctccatctcctattcccctctcttctggtttagtgctttaggaaatgtggcagaaatctttttctgcctgtgtctaggaaatcataattcatgctggcgtaccctggttgttgaggtccctgaatccttgtgcccacactgctgaagactccttgtgtgatacaagtcaggggacatctgggtcttgactccccagatgctccagctggaccctgctgccctcccttgcccaccctcttccattgtagatgccaaggggctgagcgatccagggaagatcaagcggctgcgttcccaggtgcaggtgagcttggaggactacatcaacgaccgccagtatgactcgcgtggccgctttggagagctgctgctgctgctgcccaccttgcagagcatcacctggcagatgatcgagcagatccagttcatcaagctcttcggcatggccaagattgacaacctgttgcaggagatgctgctgggaggtccgtgccaagcccaggaggggcggggttggagtggggactccccaggagacaggcctcacacagtgagctcacccctcagctccttggcttccccactgtgccgctttgggcaagttgcttaacctgtctgtgcctcagtttcctcaccagaaaaatgggaacaaggcaatggtctatttgttcaggcaccgagaacctagcacgtgccagtcactgttctaagtgctggcaattcagcaaagaacaagatctttgccctcggggaggctgtgtgtgtgtgagtatgtatggatgcgtggatatctgtgtatatgcccgtatgtgcgtgcatgtgtatataaagcctcacattttatgattttgaaataaacaggtaatatgatagagtttaactgaaaaggaatcctctttagataggggaggccacaggagacctctctgaagtggtgactcttgtgctaagaccctaacggctgaaaggaaatggaaggcttaaaagacaagagaggaatattccaagaagaagaaactacttcaagggctgcggataggagagagtgttgtgtttgagaaagaagggcaaggttgtgagatggaggacgtgtaggaggtgaagatggagattgggcagaaaccaaatcataaacatatggctttgtcagccttttcagaaatttggattttattctcattgcaactattgtaaggagagtgaaaaccagactaagtatttttattctttgagacaaagtctccctcaatcatccaggctggagtgcagtggcacaatcttggctgactgcaacctccacctcccgagttcaagcaattctcctgccacagcctcctgagtagttgggattacaggcgcccgccaccacgccctgctcatttttttatatttttagtaaagacagggtttcaccctattggccaagatggtctcaaactcctgacctcaagtgatcacccacctcagtctcccaaagtgctggaatgacaggtgtgagccgccacacccatcccagactaatgcttcaaacaaaccactctgttgggtagagagtgaattgcagattcctgagaatgtcactgtctccaatcatgtgatggatgatggaggcttggaccctggcaatggagcagtgaagataaacctgatcatctatttggaggaagagcccacacccacaggatttgctgattgatcagacatagggagtgagagaaagaggaagagtcaaggacaaagtctacatttttgctttgagtagcagaaatgacgatggagtaatttactgaaatgaggaggacagaataaacaacaagacactgggtctgggggtggtagtgaggggtgacctcagagatccattgtggaccctcttttcttttttccttttttttttttttttgagacgagatctctctctgccacccaggctggagtgcagtggcgcaatcatagttcactgtagcctcaaccttccaggctcaagagatcctcctaccccagcctttcaagtagctgggactacaggtgcgtgccaccacacccagctaattcttcattcttattttttatagagacaaggtctcactatgttgcccaggctggtcttgaactcctagccttaagcaatccttccgacttggcctctcaaagtgctgggattacaggtgtgagccaccatgcccagcctcattgtggactttcattaagcatgagatgactattacaaatccaagttatcaaggaggctgttgaatgtatgagtctgttgctcaagcacaagattaaaggcagctctgtggaatcagggggaagatggagccatggagggaagggaagaagactggccagaggggtaggagaaaaccagggcaattccagaatccaagagaagagcgtgtttgaaggacagagtgtttaatggtgttaaactctacagagaaacagaaagaagcggggaagaaaggagaggtgaagagaggaggggaagagagaggaaagggtccattggattgacagctggaggctcttggcaattgtgttgaaagcagcatcagagagctgggagagtggaaaccagattggagagtgctccaaagagagtgagtgggaaggtggagatagagtagataaccctttgaaatggtttgactatgaaggggagtatgaaggagttaggatgactgcaagggagtgattagaatgataggtcatggagtctgggctgcactcaaaaagaaataaagatagaggccgggcacggtggctcacacctgtaatcctagcactttgggaggccgaggcgggtggatcacttgaggctaggagttcaagaccaacctggcaacacagcaaaacaccatctctactaaaaatacaaaaaaaaattagccagacatggtggcatgcacctgtaatcccagctactcgggaggctgaggcaggacaatcacttgaacccgggagatggaggttgaagtgagctgagatcatgacattgcactccagcgtgggcgacagaacaaggctctgtctcaacaacaacaacaaaaggatggggtgatagtgaaaagagagtgtcagtgaattgacagtctcagtagggctgaagaatttttgcagcgatggtattagattacgggagctggaaggacatgaggtgaagtcaaagtggggatgttgaattcgagattttggaggtgtttcagtgactgaagatgacaaggcgagggtgaggtttctcaacattggtactattgatacttggaactggacaattctttgttgtgtggggctgtcctgtacattgttcagctgcatctctgtcctgtacccataaggtgccagtagcacttctccagtggtgacaaccaaaaatgtctttggatattgtcaaatgtctcctgatgggccaaaatcatccccagttgggaatcgctgttatgtgatagctcatttcattctcactttgaccctgtgaacatggggttattatgaatcaggtgtcattgagatcaggatcaggagcctgtggtctgttgccaaataattaagagctctctgggctcagttgtctcatctgtagaatgggctaataatagtatccatcctataggattgctgtgaggattaaattatgtgaaacatgggaagtgctatacaacagtacctggcacgtgataattgttaattatcaacaattgttatttatcactgaaatagatgtactgtagagatcgcttgcaagcgttgaaattccatcatcgtcatattactcaccataggctattattaaaccatatcccatgtggtatttttactccctgacatatgtttgaagcggttactgtgttccagacaatctgctaggccctcaaagaaagaagaaaaatacctctgaaattgtaatgctcatagacagaagaagtggttgttcctaaaagttgtgttacagacaaattactatgagaaatccaaggaaggagaatcaggagaggcttctaaagagaggaaatatatgagctgggatttgggcttatggacatggaacaggtttggggtggaaaaacatctctgacagaagcaacaacgtgagcagaagcatagagatagaaaaacacaggggacacatagatgctataagtaggtcagttggctgcagcagagatgtgggggatgaggctgaaaggtgaggcgggaccaaatggttgaaggacttgcactccaaggagctttgagagccattgattacatccattatgttactatgtgaccaatacactactcattagaacatttacgtgatctcagagcttccttatatgcaccttgttcctttcaactcacttttgttctcttggttttttggggtcctcttaacaccctcatgaagtctatagatgggaatggtacaccctagtttactaacccaggaataggtacccaacaggcactgccaatattggatgggctggttgattggccacgcctgaggaagatggcgtcccaaggcctgaggtctgcatcccagactctccatcctgatcgaccttctctacctgcagggtcccccagcgatgcaccccatgcccaccaccccctgcaccctcacctgatgcaggaacatatgggaaccaacgtcatcgttgccaacacaatgcccactcacctcagcaacggacagatgtgtgagtggccccgacccaggggacaggcaggtgggcaaactctgggattttaccttgcaaagggtgaggatggggcttaagacaggaggcaggagaaagtggagtctagaaggtagaaccaggatgcaacagttttctgggttccagggtagggaataaagggcaagattgtccatttgttgaggctgtttattcagtaaggtgactgacagcctttactgaatgaagccattgttgggatgaggcaatccactggatgaggtaacccattgggtgaagatgttcttgggtgagaattccattagttgacattgtccattaagtaaaagtggtcattgaagtaaggctgcacagttgggtaaggctatccattagacaattagatgagactacccattgggtcaggatgtctgctgggctagaccatcctctgaaacctccaaagtataaacttgtcattgggcaaagctcttcaaaggataagattatcaatgggatgaagtgatccactgagataagatgatattttactgacattgttctcagggaaagttttccattgaacaaagatggccaattgggtcaaatttgctctccaaacctgccatgagagtgaggccaattagtttctattactcatctcctaaatatccaagaaatggtattttttgagccagctggtccggggtttcatcaactgctgctccttctcccaggaaagactatccctgtcacccatcccattgccgctggggacagccaggcctgggccttggtttgggagaagcagtccaagtctgcatatcaaataaatgatggaggagatgggtggtaggaccttccagacctcataaaacttaggctttatgatctgggactcacagaaggttgagcaataaaagaccttagggattatctggtttaattaattctctcattttatagaggaagaaattaagtcaaggtggggcagggtgggaggggagaactttcccgggcctcttcatttactcccacaaaggctggaattttgagcagcccctgtctgtctgtttgtccttccagccacccctgagaccccacagccctcaccgccaggtggctcagggtctgagccctataagctcctgccgggagccgtcgccacaatcgtcaagcccctctctgccatcccccagccgaccatcaccaagcaggaagttatctagcaagccgctggggcttgggggctccactggctccccccagccccctaagagagcacctggtgatcacgtggtcacggcaaaggaagacgtgatgccaggaccagtcccagagcaggaatgggaaggatgaagggcccgagaacatggcctaagggccacatcccactgccacccttgacgccctgctctggataacaagactttgacttggggagacctctactgccttggacaacttttctcatgttgaagccactgccttcaccttcaccttcatccatgtccaacccccgacttcatcccaaaggacagccgcctggagatgacttgaggccttacttaaacccagctcccttcttccctagcctggtgcttctcctctcctagcccctgtcatggtgtccagacagagccctgtgaggctgggtccaattgtggcacttggggcaccttgctcctccttctgctgctgcccccacctctgctgcctccctctgctgtcaccttgctcagccatcccgtcttctccaacaccacctctccagaggccaaggaggccttggaaacgattcccccagtcattctgggaacatgttgtaagcactgactgggaccaggcaccaggcagggtctagaaggctgtggtgagggaagacgcctttctcctccaacccaacctcatcctccttcttcagggacttgggtgggtacttgggtgaggatccctgaaggccttcaacccgagaaaacaaacccaggttggcgactgcaacaggaacttggagtggagaggaaaagcatcagaaagaggcagaccatccaccaggcctttgagaaagggtagaattctggctggtagagcaggtgagatgggacattccaaagaacagcctgagccaaggcctagtggtagtaagaatctagcaagaattgaggaagaatggtgtgggagagggatgatgaagagagagagggcctgctggagagcatagggtctggaacaccaggctgaggtcctgatcagcttcaaggagtatgcagggagctgggcttccagaaaatgaacacagcagttctgcagaggacgggaggctggaagctgggaggtcaggtggggtggatgatataatgcgggtgagagtaatgaggcttggggctggagaggacaagatgggtaaaccctcacatcagagtgacatccaggaggaataagctcccagggcctgtctcaagctcttccttactcccaggcactgtcttaaggcatctgacatgcatcatctcatttaatcctcccttcctccctattaacctagagattgtttttgttttttattctcctcctccctccccgccctcacccgccccactccctcctaacctagagattgttacagaagctgaaattgcgttctaagaggtgaagtgattttttttctgaaactcacacaactaggaagtggctgagtcaggacttgaacccaggtctccctggatcagaacaggagctcttaactacagtggctgaatagcttctccaaaggctccctgtgttctcaccgtgatcaagttgaggggcttccggctcccttctacagcctcagaaaccagactcgttcttctgggaaccctgcccactcccaggaccaagattggcctgaggctgcactaaaattcacttagggtcgagcatcctgtttgctgataaatattaaggagaattcatgactcttgacagcttttctctcttcactccccaagtcaaggggaggggtggcaggggtctgtttcctggaagtcaggctcatctggcctgttggcatgggggtgggacagtgtgcacagtgtgggggcaggggagggctaagcaggcctgggtttgagggctgctccggagaccgtcactccaggtgcattctggaagcattagaccccaggatggagcgaccagcatgtcatccatgtggaatcttggtggctttgaggacattctggaaaatgccactgaccagtgtgaacaaaagggatgtgttatggggctggaggtgtgattaggtaggagggaaactgttggaccgactcctgccccctgctcaacactgacccctctgagtggttggaggcagtgccccagtgcccagaaatcccaccattagtgattgttttttatgagaaagaggcgtggagaagtattggggcaatgtgtcagggaggaatcaccacatccctacggcagtcccagccaagcccccaatcccagcggagactgtgccctgctcagagctcccaagccttcccccaccacctcactcaagtgcccctgaaatccctgccagacggctcagcctggtctgcggtaaggcagggaggctggaaccatttctgggcattgtggtcattcccactgtgttcctccacctcctccctccagcgttgctcagacctctgtcttgggagaaaggttgagataagaatgtcccatggagtgccgtgggcaacagtggcccttcatgggaacaatctgttggagcagggggtcagttctctgctgggaatctacccctttctggaggagaaacccattccaccttaataactttattgtaatgtgagaaacacaaaacaaagtttacttttttgactctaagctgacatgatattagaaaatctctcgctctcttttttttttttttttttttttttggctacttgagttgtggtcctaaaacataaaatctgatggacaaacagagggttgctggggggacaagcgtgggcacaatttccccaccaagacaccctgatcttcaggcgggtctcaggagcttctaaaaatccgcatggctctcctgagagtggacagaggagaggagagggtcagaaatgaacgctcttctatttcttgtcattaccaagccaattacttttgccaaatttttctgtgatctgccctgattaagatgaattgtgaaatttacatcaagcaattatcaaagcgggctgggtcccatcagaacgacccacatctttctgtgggtgtgaatgtcattaggtcttgcgctgacccctgagcccccatcactgccgcctgatggggcaaagaaacaaaaaacatttcttactcttctgtgttttaacaaaagtttataaaacaaaataaatggcgcatatgttttctaagtccttggataagtatcttttctttcaggtatcagaaataagactgaatcttctggttctacttgggggttaaaaaattttttttaaaggaagaatgagaatagttttatagttctttgtgatgtgcagaatgtttttgtgtccattataatttttcagtcttcacatcaagaggtaagcagttagacatgattactcccactttccagatgaggagactgaggcttgggggaagtgacttctcttggaaggcagaggtggacatctaaccctggtctcttgattccaagtacttagtatatcgagagagtgaaagttgatcccccttcttgaagaggggagtgatgaggggagagtgcaatggcaagatctggaagaatggcaagagggtccaagggtctgtcatcctccaccaaggttcaagacagaaccttttgctgggtcacctcaatctgccagcaatggaagatgagtagctgtggggacatttcataaaagcaagtggtttttttgttttgttttgttttgttttttgtttttttttctagaacaaggctgtgcacagtggctcacctctgtaatcccagcactttgggaggctgaggcgggaggatcacttgagctcaggagttcgagaccagccagagcaatataaggagaccccatctctacaaaaaatttaaaaattagccaggtatagtggtgtgtgcctatagtaccagctactctgaaggctgaggtgggaagattgcttcagcccaggagttcgaggatgcagtgagctatgaatgcaacactgcactacagcctggatgaaagaacaagactctgtctcaaaacataaataataagtaaaaagaataaaagcaagagatgcacttgagaatctccagccagatctgtagccactgggcttctctccaaggctaaactattacaggagggtggccttgtgtctcggtcaccacagaccacagcgttccattcactcggggttgtgctggagctggcttgtgagaactgactgttagcttctcttcccaactccatgtttgccagtgccacactgatagcttgaaattggttattgccggagtgtttacaccacaaggactagcaaactctacaaatccgggcttttgttcctggagagcccgttgttaacattcaccagcacaccacagcattcggcaatggctggaccatgggatgcctacatatggggacatcctccttggggatgagggtagagcagggcgatcctttcacctcttccttaagggaggggacaaaagttctggtctgggaagcacacgttttgctgatcagcgtaaccttgggcaggtcactccaccactccgagcctcatctgtaaagtgggaatgatatctccctccagggcagatgtcaggattcaatggaatgagatcacagtaactgtgagagctcccgttacatgaggagtacaagtgaactcttcatgcgcccctttttagcgagaagttaaccattaaactctccaggcttcagagcacccattcgctgtctacctgatccctagggccgctcccgccttcccctgtgccttccctccactagtcagcaccaggaaatgttttcgataacgttgcaacggaggccttgttcatgctgccgccatcggggacaagcgcgggggggggggggtggaggccagaggagactatttcagtcctaaattgtgcttaataaacccatatcaaaaccataaacccttggctgccataaattcctctacccttggatcctccacctcatcagccctttgccctggttaatctcaaatctcagcgcaggcagccggagctttaggtttggtttctacttcagttgctaaacagcatcagctcaggtggcagacagtaaaattcccattttagagatgatgaaactgaggttcagaaaggtgaagaaacttgtccaaggtcacacagctagagaccccagccaagacctgagcccatgcttccaccacccaggtagcctgattaagaaatgggaattcttggctgagcacagtggttcacccctgtaatcccagcactttgggaggccaaggtgggcggatcacctgagattaggagttcaagactagcctggccaacatggtgaaaccccatctctactaaaaatacaaaaattagccgggcacagtggtgcacacctgtaatcccagctactcaggaggctgagccaggagagttgcttgaacccaggaggcggaggctgcagtgagccgagatcatgccactgcactccagcctgggtgacagagcgagactccatctccaaaaaaaaaaaaaaaaaaaaaaaggaattctcaattctcaagcttctcggggagacagatttgaggtttcctcttacatctttgtttggtggccctacaattaaacctctttctctgctacaaaacaatggaaaaaaactggaatttctaaggctcctcattttttttttttttttttgagtcagggtctcactctgtcacccaggctggagtgtagtggtgccatcatagctctctgcaacctctgcctccagagttcaagcaatcctcctgcctcagccttttgagtagctggggtacagtgtgccagcacacctggctatttttttcttttatttttagtaaagatgaggtcttgctatgttgcccaggctgacttctttttagcacctctgaaaagttgtttccccaagccatgctactagaagcttcttattccatcattccatcattgctcagagtggggaccagaagtagaagggaccctgggtgacaggctgcttgaagatccaaagaaagtttcatgcagtgtgaatggcctgtcatcccaaattggtgaaatcgtcctacttcctcatttgtggaacccagataacctttgagctacacttctcaaatccacgtatcatatgtaaattccaggatgtgatctcagaggcctgaatcacaggatcccaggcagctgtttgacaatggtggagttagacaccaaatcatgatgccaaggacatttactgggctcttcctctttgccaaacatggctggacataatttaattcccacaacaacctctgaggctgtcattcttgtggttctgtttcacaaatgaggaaacaagaccggtcatggtggatcacgcctgtaatctcagcactttgggaggctgaggcaggtggatcacctgaggtcaagagtttgagaccagcctggccaacgtggtgaaacctcatctccattaaaaatacaacaaaaaaaaaaaaccagccaggcgtggtggcatgtgccagtagtcccgactactcgggaggctgaggcagcagaatcgcttgaacccgggagacagaggttccagtgagccgagatcatgccactgcactccagcgtgggcaaaagcttgagaccctgccacaacaacaacaacaacaaagaggaaacaggctcaggaggagagaggaagggacttgcccaaggtccacacacagctggtcaccaatccatacctggtgtggccgctgatctgatgctcattgtctgactccaggggccaatatgaggcctcgaggaagacactggtgactccatcactgcgtggtgggcacagaagtagtgtgaatggtggaaagctcatctcatgacaaatgttgatgggcagagccctgtgccgggaaccctgggattatggagaagcaatagcgtgaggcgcctccctcccagagctttcagttttcatatggacaggcgaaaattagaagcagttaagagccaaaggggtgaacgtgacagctggtgaggtggtagggagggagaggcgactgcactcagggagtggtgtatgctttgagggacgattcagaggcaataatgaggcaagacagaagtgcgctcgaggctgaggactgagcagcaagtgggaggaggcagcgggaactctgtgcatgggggcaagacgagggctggcattttccaaccttcgtgcacaggccaccttgacctctccatgcccaaggaccgctgtaacttccattacttatttttcattaaatcagttcaacatgattccccttaaacttcaggtcactgacataaataggaaaccagcatcatttgccgtaaataagaggtgactgcaaaattagtgaaaagaaaacaatgtttttcagctgcagccaggtggaatcgccccagggaaagctctgctcttgttttcgtattaaaaaggaaaactgacaaatattacagagatgttacgggcatacacgtacccaatggagactttctccttaaagctttcagaaaaggcctgtaaaggacagactttggggacaatatcacttaataccttccagtatgtttctaaaacttcccccagttccactggaagccctcatccacttctggaagctcactcactaggacagctggcccgcacacaagtggtggggacctcaaatactggacagaggagtatggaatttcttccggggaaaaggaagccactagaggtttctgtttgttttttgagaggggttctcgctctgtcacccaggctggagtgcaatggcgcgatcttggctcgctgcaatctctatctcccaggttctagcaagtctcctgcctcagcctcccaagtagctgagattacaggagcatgcaaccacacccagataatttttgtatttttagtagagatggggtttcgccatgttggccaggctggtttccaacccctgacctcaagtgatccacccgccttggcctcccaatatgctaggattacaggcatgagccgccacgcccggcccactggaggtttgagagcagtgaaggttgtaggcagatctgtatatatgtatataaagatacatatatttatatatattatatattatatatttatatattttatattatatatttttatattatatatattttatattatatattttatatatatttttatatatctatatattatatattttatatatatttttatatatttatatattatatattttatgtatattttatatatttatatattatatatttatatatatttatatattatatatttgtatattatatatttgatatattatatatgtttatatattatatgtttatatattatatatgtttatatattatatgtttatatattatatatgtttatatattatatgtttatatattatatatttatatattatatgtttatatattatatatttatatattatatgtttatatattatatatttatatattatatgtttatatattatatatttatatattatatgtttatatattatatatttatatattatatgtttatatattatatatttatatattatgtttatatattatatatttatatattatatatgtttatatattatatatttatatattatatatgtttatatattatatatttatatattatatatgtttatatattatatatttatatatgtttatgtattatatatattatatatgtatgtatgtttacatacatatatacatatgtgcgtatgtaaacatacttatatacatatgtgtgtatgtatgtttatatacttatacatatgtatatatatatatttatacatatatgtgtgtgtgtatatatatatatttttttttttttgagacagggtctccctctgtcacccaggctggagtgcagtggcgcaatcacagcccactgcaacctctgccccctgggctcaagtgatcctcctacctcagcttcctgaatagctgggaccacaggcaccaacaactatttttttgtatttttagtagagacggggtcttgccatgctgtccaggcttgtcttgaactcctgagctcaagcagtccacccgcctcggcctcacaaagtgttggaattacaggtgtgagccactgcacctggccagatctgtatctttaaaacaacaccctggctgctttgtggcagacgaagaggtgcaactgtaagctgggagaccaatgaagacacaagtgcactggatcaggtgagaggtagtgatgtctacaacaagatggtggcagtggagtagagaaaagcaccaatccaagagactttcattcattcattcattcattcgttcattcaacaaatatttagtgagtgtctatctgttgaacatttttctgagtctgagaggtaggcaggggtgagaccagaggtagccttctaggccacgagaaagattctggattttcttgttggtatagtaggaagctcttcatttttgaatagagaagtgatatgatctgcttgatgttcttaaaaggccactctctgctgtatagataatggactatgtggaaaaacagtggaagcagagacgcccacaggtggcctgggcagtggtccaggtgaaagatgatggcagcatggactagggttgtggagtgggcagaattttttaaatgccccccaagacgcctgcctttggtgcatacacaccttctttcagttatccaattagacatgaatctaggtgttcctgtgaagagattttgcagatgtaatttaagtcccaaaccagctgactttttgatagagagatattctttggtgggcctggcctaatcaggtgaggccataaagggagctgaactctttctatgaaattagaaacatgagaattagaaacgtgagaaattagaaatgtgattccacataagggagagtctctgttgctggctttgaagacaagggggccacttggcaagggatgcaagtggcctctagaaactgagagacccctggctgacaaccagcaagaaaatggtgacagggtgacagtccaacgaccatgaggaactgaatgcaggcaacaacatgaatgagcttggatcctttcctagagccctcaggtaggtacacagcccagtcgtttaagaacccgagcaggagacccaatcacaccacatctggactgctggactatagacctgtgagatcacaaatgggcagcgttttcttttcttttctttggaaacagagtttcgctctttttgcccaggctggagtgcaatgatgtgatcttggttcactgcaacctccacctcccaggttcaagtgattctcctgcctcagcctcccaagtagctgggattacaggcatgcaccaccacgcccagctaattttgtatttttaatggagatggggtttcaccgtgttggccaggctggtctcgaactcttgacctcaggtaatctgcccacctcggactcccaaagtgctgggattacaggcgtgagccactgtgcccagctgacaaatgggcagtgttttaagcatctgcatttgtggcaatttgttatgcagcaatagaaaatgaatacaggtggtggtggtgagaggcggtcagagtggagtgttctggaagtagaacagccaagaacttactaaggtatgtgaaggaaagtaactgtggccaggtggtgctgtctgttgacagaggaagactggaggagctgcaaatttgggttagaaaataagagcttggttttggatgtgctgtttgagatcccaattaaacatccagggacttgttggatatatgagtctagagcttggggaaaagttggggctagagataaagagtctaagtcataagcatagatgagaagtttaataatcaactgggctgagcatggtgctcactcctgtaatcccagagctttgggaggcgaaaaagggagaatcccttgaggccaggagttcgagaccagcatcggcaacacagcaaaacccccgtctctacaaaaaattaaaaaaaaaaaaaaaggtaggtgtgctggcacatgcctgtagtcccagctcctctggaggctgaggcaggagaattgtttaagcccaaaagtttgaggttgcagtgagccatgatcaaaccactgcactttagcctagatgatagagcaagaccctgtctctattgaagaaaaaaaagtcaataggaagattgctcagcaataaaaagaagagaactactgatacaaacaacatgggcccagtcgtggtggctctattcctagcacttcgggaggcggaggagggggtggatcatttgaggtcaagaggtcaagaccagcctggccaacatggtgaaaccccatctctattaaaaacacaaaaataagctgggtgtggtggcacatgcctgtaatcccagctactcaggaggctgaagcagaagaattgcttgaaccctggaggcggaggttgcagtgagctaagatcgagccaccgcactccaggctaggcgacagagggagacttagtctcaaaaaagaaaaaaaagaaaaccatggaactcaaactcataacactaggtgaaagaagccaggctcagaagactacatactatatgattccatctctgtgatgttctggagaaggcaaaaccatagacacaggtatgtggctgccaggggcaagggctggggtaggggtttgaataccaagggacacaggggagggggtttggagtgatgggaatgctctgagaaaatcttgattgtgatggtggtgacatgactgcatacatgtgccaaaacgtgcaaaagcatacactaaaaagggcaaatcttagtctatggaaattataccttaatttggccaggtgcggtggcacacgcctgtaatcctagcactttgggaggccaaggcaggcggatcacctgaggtcaggagtttgagaccagcctagccaatatggcaaaagcccatctctactaaaaatacaaaaattagctgggcatggtggcgcacacctgtaatcccagctattcgggaagctgaggaaggagaatcgcttgaacccgggaggtggagaggttgcagtaagccgagatggcaccactacacttcagcctgtgcaacaggagtgagactccatctcaaaaaaaaaaagaaagaaaattataccttaatttaacaaatgaaagaaatgaaaagccaatagttgcttgggctcattgaagagtgaagagaggaaacagaaaataggtgaggacttcactctaggttgcaccaccatggaggttggagagagggaaagggaaagctgcaaagaacaagtgaggtgaatagaggccgggcatggtggctcacgcccgtaatcccagcactttggaaggctgaggtgggaggattgcttggagcaatcctcaggtccctaggagttcaagacccaccagggcaacttagtgagaccccccgatctctgcaaatataaaaaaacttaaccaggcgtggtggtgtgtgcctgtagccccagctacttgggaggctgaggcaggaagattgcttgaatccaggagttcgaggctgcagtgaccgtgaccgtaattgtgtcactgcactccagcctgggaaacagagtgagaccctgttgtaaaaaataaaaacaaaaaagatgaatatagttggtgaacgaaagggattcaagcaaatttgttgcagacctactaggtgctaagtgtgctgacatactggtcttacccactcaccttactgagattgttggggaggtgaaatggactagccctgctatacggatgagaggaaagtggtttgccctgggtccacacacagcataatagtggtgaagtgagaatatccatgctggtgtgtcctgcacactcttccctttgtatcaaatgagtggaagaatgaatgagtgaatatcactgcaggtgctgaggtttcactagcagattccagccaaggatctgagaacgtgatatttttagcgaagttggggccataaaacttgttccatttcccaacttgtgcaacgcccagcccctccccctgtggctctgagattgctccccggccttgggaagggctccccaggcttatctaggggggagagtgaaactgtaaaagcctttatggctttgagatcacgtctgcaaggggcagcgattgtcgttataaacttgagctggccctgcaagggagggcaatagcctgggctgagaggagtcaggggagagttgagcaatgccaagggagcggccgtgctgagccgagcattctggggcctgtggtcagggaccatcattcatttacctcatttcatcctcacataaaaccctgtgagtttttttctttttgagacagatcttgctttgtcacccaggttggggtgcagtggctcaatcatggcccatggcaacctcgatcccctgggctcaagtgatcctcctgcctcaccctcctaagtagctgagacaacagacacatgccaccatgcttggcaaatttttaaattttttggagacttagggtctcactatgttgcccaggctgatctcaaactcctgggttcaacttgtccccccacttcagcttgcaaagtgctgggactgcaggtgtgagccactgcgtctagccttattgcaatgtttttaaacattctatgacatgccctttttcacattatggtatctctgaaatcaggatgcgtctttaaatcaatggcgtcccacaattgctaagggtttgatcaggtggtagccctgacctagttggttctggtcattatttccagtggcctaactggacaactgcaccccctttgtatttcatcaaaaatgacttaaggaccatttgaggaagggaccagagtcctgcttgtttcccaaaaccttccattaacaccttctgataagatcaagaaagcacctggggcaaaacctgcagaataggaggaagtgggttgggaggaaatccaggagacaatagtggagtgttttttcaagaaatgctgcatgggccgggtatggtggctcacgcctgtaatcccagtactttgggaggccaaggcgggtggatcacgaggtcaggagattgagaccatcctggctaacacggtgaaacctcatctctactaaaaatacaaaaaattatccgagcatggtggcaggcgcctgtagtcccagctactcgggaggctgaggcaggagaatggtgtgaaccccggaggcagagcttgcagtgagccgagatcccaccactgcactccagcctgggaaacagagtgagactccgtctcaaaaaaaaaaaaagaaaaaaaaaaaagaagaaatgctgtaggaacaaagcattaatgggatggaagttgatattgcatggaaaaatatggacaatgaagattctgggcagaaaagtgacctcagtgggctggatgctgactgtgagattttgaaactccttacctaatctatcttacccagattttcctttttatgtgtgcacaagggtgatatatgattttttattttcttgagacagaatcttgccctgtcgcccaggctggagtgtaatagtgtgatctcagctcactgcaacctccaccttcccggttcaagcaattcttctgcctcagcctcccgagtagctggaactacaagcgcgcaccaccacacctggctaatttttgtatttttaatgaagatggggtttcaccatgttgaccaggctggtctcgaactcttgacctgaagtgatctgcccacctcggcctcccaaagtgctggaattacaggtatgagccaccatgcctggcaattttttttttttagatggagttccactctgtcgcccaggctggagtgcagtggcaagatcttggctcactgcagcctccacctcccaggttccagcgattctcctgcctcagcctcccgagtagctgggataaaaggtgcccgccaccacacccggctaagttttgtattttcagtagagatgggttttcaccatgttggccaggctggtctcaaactcctgacctcctcccgcctcggtctccaaaagtgctgggagttttacaggtgtaagctgcagtgccctgccaatatataattttaaaaactatgtctaagtctcaaagagccttttaataaatagaaaataaaaattctaagtgataaggaggcattgtcacaattaattggcagtgtcttttctaagtggtacataaaatgctagtgctgcttacagcagaagcatctccagtcaggttatctcatttcacagatgagaaaactgaggacacagaggccacagggcaaatcagtgatggtgccagggctctctctgacaacagatactgtgctcttcctgacacctgaggatgacttggatgtggattagccccctggctcttcctccctcaaaggtcttggtcccagccagacaactccaactctgccatcccaagggcctctgggaggcagtaagttctcctattgttcaaaactcaggccagcatggtggctcacacctgtaatcccagcattctgggaggccgaggtgagcaaatcacctgaggtcaggagttcaagaccagcctggccaacatgatgataccctgtctctactaaaaatgtaaaaattacccaggcatggggtggtgggcacctgtaatcccagctactccggaggctaaggcaggaggatcacttgaaccggaggctaaggcagaggttgcagtgagccaagatcacgccactgcactacagcctgggagacagagcaagactccatctcaagaaaaaaaaaccaaaaaactctagctgaggagggttagccggaagccttcttcccaatgtaccaaccacccctacttcccactgctcacctcagcaaccccagtctggccaagtccatcccaacccatgctgccacacgcccttcatgctcttcctaggacatttaatcacctggtcttgggccaggcagactggactctcccttcattttacagacaaggaaactgagacacagagaggctgctggactgttgcaggcaagtcagggaagggcacggtctggaacccagggctcaaaatgcagtgttctttccaacttcacagatttcttagatccagaagaggcaggctggcaagggacagcaagggactcagagtgagtcaaaagaaaggacttccagatcagaaggattggtaagacctgaacatgtaattgtgggatgatgccaaaggtcttcacctgactcttgtcaacactaacaggttccgggacagctgcactctagggggccagtagaggcaccatcttgctcaaagaatggggccaaactacaccaggcatctctaccatccccatcagatcctacctctctctgcttaaaaccctccaatggcttcccatcattcttggaacaattttaaattcttcaccagggccccaaggtcctacagaacctggttcctgatcacgcctatgagatcatctccccatggtcactccattccagcccccttgggctcctccctgttcctcaacacactaaagctgttcccatttcacagcctttaccctaatgttccctttatctggaacattctgtcctcagctcttctcatggccacttccttctaaacattcaggtccctactcaaacgttgcctcttggagaggccttccctgatcacttggctaaatacacgaggctttgcaggatatacagtccctgctgcaactacttaagtctgctcttacagcgtaaaacagccataagcaatatgtaagtgaatgggtgtggctgagttcaatgaactttatttacaaaagtaggcagtaggctggatttggcctatgaatgtagtttgcttactccagctctaactaattgtcttgtttgattgtcttcctctatccttccctctctagactgttaactccataagagcagagactctagtctcattcaatgctgctgtggtagccagcctccaagatgtcccccagtgatccccatttcctggtattcccaccattatttactcccctcccaaactgagtagcgttgtctgtgtaatcactaggatattgtgaaaaagatggagtgtgacttttgaggctagatgataagaggcattgtggatttcatcttgccaccttgaatcccttgctctggggatgccagcagccatgctgtaaggacactcaagcaatcctatggcaaggtccacatgggaggaattgaggcctcctgccaactgccagccatgcaagtgagccaaattgaaagtggattctcaagccccagtcaagctttcaggggatcactgtcccagctggtattttgactacaacctcatgagagatctaagccagaaccatccagccaagccatttctgaagtcctaccacacagaaactatgatataatacatgtttgttgttttaaaattaaggtaattagtaattagttatgcagacatagatgactcacatagttgcctagcacagtgtctggtcacagaataaataggctaattaatattggttaataaataagtgcttaataaatatagaaggacacattataaaaataaatgtttggggccgctgcggtgagtgcattctcactcaataggcgccaactaaacttttattaaaataaaataaatgtttgaaagacaaatgtattatagtttttatataaataaatgtaaaaatatacattaaataatatagaagggcacaattaaaattttcctaatccactgatagtccttggacaagatgcctatataagaattctttcaaccttgagatcctaagattcggagattctcagtttctgtgtataattaatgctaagtctaggattatataattctgagactttaggcttctgtttcaccaagtccatggctctaaaagcttgtgattctaacatcttatgattcatttatcaacatatatcttggctgaacaactcttctctgccaggcacagtgctgggtgctagggattcagtagagaaaagatgatcccgatatctgccctcctgtggctcatgagtggatggggacacaggcaaacacacgggcacacatgatgtagtgatctctgtcacatggtaagcacagcagctggggtggggactgtggtaaatgaaggaacaccaacccagatattcaggagggatgtgagcagaaactgtcctcagagcaaacaggaagagagaggacttcaaccagagaaggaggtggtgttgtagactgtgttccaggtagcgggaacagccagtgcaaaggtccaggggtcaggggagagagccagcatccagcacatctggtgaagcaaaacaagttctgtatgggttggtatagagttgggggtggggggcggtagaaggcagagtggccagactgtggccagatgactgagaacctagtaaaccatgtcaaggagtttgaactttatcctgagggcaaaggggagccagggaagggttttaaggggcagcagagtggcacaatctgcttggtagtttggaaagatgcctctggctcctgtgtacgggtttggaaggaggagagacaagagacaagtctggaacaagatcccaggtgagagaagaggcctgagtgaatgggaggtgggccccagagagacatttcatttacagtgtggggaatggacagggagttggtggcagtgtgggttatactggtaacctaggagcccaggactcctagattttatgattctaaaattcttggccaggcacagtggctcatgcctgtaatcccagtactttgcgaggccaaggtgggcagatcacttgaggtcaggagtttgagaccagcctggccaacattgtgaaaccccgtctccaccaaaaacacaaaacaattagccgggcctggtagtacatgcctgtgatccctgcgactcgggaggctgaggcaggaggatcccttgaacccaggaggtggaagttgccctgagccgagatcgcgccactgcactccagcctggttgacagattgagactccttctcaaaaaataaaataaagtaaaattctctgattctgtgttcaacactccatcattcttcaacacaaaatgttcaatgatatcaccatatgtgtaggatgcccaaccttaccgccctccatccctcctttctgagcttcagttttccttgtttacaaagtgaggatcattaacactgtccttgcaaagcagccgtgggagtgggagacggtgtgtactcagcatctgcacagaaatgtggtccatcatggcaggcgtgtttgtctggaagtgctcaacacacaggcactgtcaggaaagagccgggtgttgagagaacaagacatcagcagggaagagcagggcaggcaaggaagagcctggtccttgtctgctcctggagacctgggctgctctggcctcccggcttctgcctgggcatctgatacccagatttggttgtttgcttccgggtaccgacaagtttacatgttgtttgtggaattccccatttctgcagctggccagaaactcccctttcctggtcttaaactcccccaagggctacagacaccagctgggggtagccaggcaagatctggtcttccctggactgatctaagccagatcaagtcccaacctgctcacactctagcgccccctctaggtcacactataggcattcccttcttagacaactaactgtccattggctccagcaagagcaagtctttggagacagaaccctcactcctctccccaaaacacatggtctcctgaaccacacccaaggtttatgtgtctcctgcattctaatttgcttctcaccaatggttcagttttaattcagtccaatccacaaaacatccattgaagccgggcatggtggctcacacctgtaatcccagcactttgggaggccgagacaggtggatcacttgaggccaggagtttaagaccagcctggccaacatggtcaaaccccatctctactaaaaacacaaaaattagcagggcgtagtggcgggtgcctgtaatcccagctattcgggaggctgcagtgggagaatcgcttgaacccgggagacagaggttgcagtgagctgagatagctacactgcactccagcctgggtgacagaacaagactccacctcaaaaaataaaataaaataaaataaaataaattgaacaacataactgtgacaggcttacccgttgcttggagaaagagatgggaggccagcagtggtgggcctgaagctgccagtgcttagtggatcagggttgggcttagggtgtgaggccagagagctcagttcatttctttgcacacagtaggggctctgtaaacacccgtgaaattaaatcaaattaggagtttaagtgacacaagctagcatgtgcaccaactatttccggaaggcgatgagagaccggagagtgagatggctttcggggtgggtgttggggggctgggtagctggggtcggggtgggaggaagacctacttctcattttatgcccttttgtaccttttgaaatgttttactttcaccacatgcacacagagcagaatcaatcaaacaaacaatcacaattaaataaacaatgcagggagccaggctgtctcagagctccatggcttcatgcctgctcttcctgctggtgagatactgtttcccagctttctccaactggggaagtacacgtcctccaagaagtacacaaatgtcctgtcttctggggcctgttcctgcctccctgtgatggttcttctctgcttacccacctcatccacacacgagtggtccaatctccaaccctgtctgtcctgctctgtggcctggaggcacctgtgccttctgacatcacaatacattcagccaaggggaggaatcggcagagataaaagggcaggatgagggagaactgggcatgtttatgccacccccagctccctccctgttttgccttaattttggcagtggctgaatttctccatggtcttaactcctgtcttagcctcacttatatggctccagctatctctgggtcaagtaacaccattctctctctcacctctttggccttggggtgctaacagctccccactgttgccagtccctgcatgcctcacctctgcaaacacttccttcattaagtttgcttcagttaagccagtggttcacaatctggggtgactttgcccccaggggacattcggtgatgtctggagacactttaggttgtcatgactggtagagaagatgctactggcagaggcaacagatagtgctaaccatcctactccgcacaggacatcccccacaacagaattagccagccccaaatatcaatagcacggagactttgggtctcccactgctccctgcctgaagcccgacagttcatggctgggattctggactcctgctggcctctctgctttgtggtgtgatctgccagtttccacacctgctgttgatctcctcttagtgacacagagatgaaaagaccccatccttgccctcaagctggccatagtgcagtggagagagaccctggtgagcggggttccccagcagcctcgagtccttgagggcaaagtctctttgtcagtcaccacgtagccccagtagtaggagagcagcagacatttgccaattgaaacaaaaggtcctttaaaaatatcttaaaacaaggccaggctcagtggctcacgcctgtaatcccagcattttgggaggccaaggtgggtggatcacctgaggtcaggagtttgaaaccagactggccaacatggtgaaaccctgtctctactaaaaataccaaaaaaaaaaaaaattatctgggcatggtggtgagcgcctgtaatcccaagccactactcgggaggctgaggcagggagaactgcttgaatctgggaggtggaggttgcagtgggctgagattgcgccactgcactccaacctgggtgacagagcaagactctgtcccccccaccccccccaaaaaaaagtcttaaaacagacagaaggttaggctcaatggctaaacaagacccaggaaaccctggtgagtttccctgtaacaaaagttccaaggaaaccacaatcaggcaaagatgtaccaaatgaatgaattctagtcccaggggtatgggtgggtgagtgggacagaagacaactatgagcatcccgtctctaaaatggttataatggtagaacccacctcctaagattgaatgagattaaatttaatgaaaatcacttacagtgttacctagggcatagtgagcaccagataaacagtatccaccagctacctggaggaaatgatggggcagcagcttcaagacgggtctagggaagagctctgccgctaatattggactggtttgcacccctgggcctcactttcccaatctgtaacgtgaggaaaatataagcaagattagtgttttgcagaaattatatcatagggatgcttgagaggggttctacaatacgtagtgcaaatatcattttcaacatcaaacctgtaatttaatacaagtaaaaggtcagtctgttaaactggagggaaatattaccatcaggcagggctagggtgaccaactcatcctcttttgcccaggacttgtctagttttagctctgaaagtcctgtgtcctgaaactctccctcagtctcagcggattaggatggctggtgaccccagcaggtcaaatgatcagcttgcccatactaattttaaagataataaatagctagctgcccgacacagtggctcacgcctgtaatcccagcacttagggaggctggctcgggcaaatcacttgaggtcaggagtatgagaccagcctggccaacatggcgaaaccccgtctctactaaaaacacaaaaattagctgggagtggtggcagatgcctgtaattctacctacttgggaggctgaggcaggagaatcgcttcaacccagcgggcagaggttgcagtgagccaagatcgtgccactgcactccagcctgggcaacagagcgagactccatctcaaaataaataaataaataaacaaacaatatatgttgaatacttattttgtgccaggcactgacttcacaagtattagctcatttaatctttataagaacccagcaaggtaaatattaacatctctctttatacaatcgcacagaaaggttctgtaattgcctgagttcacacaactcctgagtagtaaagccaggatttgattccaggccatctgggtccagagttgccatatttaatttgacctgtgctatatatttgaatatatttttattttttattttttgagaggaagtctcggctctgtcacccaggctggagtgccgtgacatgatcttagctcactgcaacctctacctcccggcctcaagtgattctttagcctcagcctcctcccaagtagctgagattacaagcatgcaccgctatgcgcagctaatttttgtatttttagtagagatggagtttcaccattttggccaggctggtttcaaactcctgacttcaagagatctgcccacctcggcctcccaaagtgctgggattacaggcgtgagccaccacgccaggcaaatatatttttaaaacgtctttggagacagtaataatatcaataatgatgataataataataatggaaatatattttaaaacatttttgaaatagtaataatgacaatacatttttgaacactgaaatatgcatcccaaaatttaacactatggaggccacgtataaactaacttgagctgcttgattagcccattgttgtgcagaccttagaataaagcatttttggccacctctgctgaattaaagctagaatggaagactcaaatgtttacagggccaggtgggtgatgtcagtgagtggttttagggcaacagagagtggtggggactgtggcaaacgggaatagaatgcatgagctgagaagatgcagccaggactcaactccaggcacttggaattggggaccagcaatggcagatccttcaggaggagacaaacatccatctttatcagcaactaattcaatgaaaacaatacaaaaacacaaggtgtgtgaaacaaaacgtgcctgtgggtcaaacccagttcctgctctccttccaccgctgccctgcccaaattgaatgtgtgctcagattatcaggaaagctgttaaaaacaacaaccacaacaacactggccaggtgtggtggctcacgcctgtaatcccagcactttgggaggccgaggcgggcggatcacgaggtcaggagatcgagaccatcccggctaaaacggtgaaaccccgtctctactaaaaatacaaaaaattagccgggcgtagtggcgggcgcctgtagtcccagctacttgggaggctgaggcaggagaatggcgtgaaccagggaggcggagcttgcagtgagccgagatcccgccactgcactccagcctgggcgacagagcaagactccgtctcaaaaaaaaaaataaaataaaataaaacaaaaaactatttgaaactgtggcatattcattcaatggaacactatacagtaacaagaataaactctagctatgaaaaatatggatgaatctcacaaacataagccagacacaaaagactacatcctgtgttattccgtttctttaatgtttaacaacagacaagactcatctctggtgtcaggagtcaggcttgtggttaccctggagaggggtgctagtgagtgattgggaggggcaaagggaagacttctgggagcctggccgggttccatttcttcatctgggtcccagtggcatgggggttctctttgcgatgattcattgagctgcacacttgagtttgtgcattttttgatgtctgttttttggtttttgttttcttttgagttgaaatatttgtcacccaggctggagtgcagtggcacccaggtggagtacagctcgctgcagcctccaccttctgaggctcaggcaatcctcccacctcagcctcccgagtagctgggactacatacaggcacgtgccaccatgcctggctaatttattattattatttgtagaggcagggggttttgctatgttgcccaagctagcctccaactcctgggctctagtgatcctcccgactcagcatcccaaagtgttaggattacaggcattagccatcatgccaagccgtatgtgcgttatacttcaaaatttatgtaaaattttttgaaacacatacacagaaaccattaccatttggaaatatttctctggacaaagcaggattgtgtttggatagaagggaaaacaaatgaggaaataatccattccaagtatgggaagcatctgacgaccctttgctgaatagggtgaaaagaatacaattgtcagggctgggctcaccactgaactccagcctggacaacagagccagaccctgtttcaaaaaaacaaaaaacaaaatgaaaaaacaaaagtgtctccttggagaggcctttctaggaagcaaccttcccagttacttcctcttagggtactataacttccccttaggaaatgctgattacagtctgcaattcccttgtttatttggggttttctttcttttttccttttttattttttttgagatggaatctcgctctgtcacccaggctggagtgcatggcaagatctcggctcaatgcaacctctgcctcctgggttcaagctattctcctgcctcagcctcccaagtagctggcattatgagcacccaccaccatgcctgtctatttttttgtatttttagtagagacgggatttcaccatgttggccaggctggtcttgaactcctgacctcgggtgatctgcctgcctcggcctcccaaaatgctgggattatggacgtgagacactgtgcccggccctttttttctttttttagtttattgtctatctccccttcatgaagacaatgattttgcctgtcttatccatcacctggcacatagcaggtgtcacaaaatatttattaaatgagtgaagagaagaagggagggagagaaggaagaacaactgagtggataattgggagttaacaaggcaaagctgggggcagttggaagctgtgaagaccgatgcgactagagatgagagaccagggggtgcggcaggcaagatgatgtccattttacagatgaggcatctgaggctcagagatggcaaggggcatgaccaagtcatccagtgggacaggtcctggatgaatccagtttccgactcaagagtcaatagaacctcagttactgagcactcatctgtactaactgatgaggtgagtattgttattccttcctaaggcacagccaggaacagtggttcatgcctattaatctcagaattttgggaggccgagataggaggattgcttgtggccaggagttcaagaccagcctgggcaacatagtaaaacctccatctctaccaaaaaagatttttcgaattagctgggctcggtgatgcctgcctgtagtcctagctgctcaggaggttgaggcaagaggaacacttgagcccaggagctcaaggctgcagtgagctatgatcaggccactgcacttcagcctgggcaacagatcaagaccatgtatcttataaaaaaaaacaaaaaacggtggggggagccgggcgcggtagctcacacctataatcccagcactttgggaggcctaggcgggcagatcacctgaggtcaggagttagagaccagcctgacaaacatggagaaaccccatttctactaaaaatacaaaattagctgggcatagtggtgcatgcctataatcccagctactcaggaagctgaggcaggagaatcgcttgaacccgggaggcagagtttgcggtgagccgagatcgcaccattgcattcctgcctgggcaacaagagtgaaactccgtctcaaaaacaaaacaagacaaaacaaaacaaaaggacctaaggcacagagagtttgagtgacttgcctaaggtcacacagctaagaagcagccaagcctcagggcttttgtctactctgaatggctattctccaccacccaccccaccttgctgccaactctctgctcggaccccagcacggtctatgaattcaaaccctaaccctttctagagctttgggcaaagccaggaaattccatgaaaccccttcaaggcctgggttccagttcccccaactccaaaccaaaagagagcaaaactagccctccttgcaaggtggctgtgagaaaacagtgataaaaattaattataggacttgtatgtaataaaaataattgcagggctcctggcaaacagcccagctctagagatacggactgatgatagcaggcatttatggccctgcggcccagcctttctgaggctggggtgataggagccgggtcacgaggtgggggtggtcacaggcaggaaactcccagcagcaaggcctgggcctgtctctgatgcagcctgcacattggtttcagggacgcttggaaggacactcccctagcctcggggggtcaccattagttatccatctggttgggtctgatgttgcttgctgtttgcctttctaaaaacctacaaacaaggccaggtgtggtggctcacacctgcaatcccagcactttgggaggccaaggtgggtggatcgcttgaggtcaagggttcaagaccagcctggccgacatggtgaaaccccatctctactaaaaatacaaaaattagctgggcatggtggcgggtgcctgtaatcccagctactcaggaggctgaggcaggagaatcacttgaacccgggaggcggaggttgcagtgaaccaagatcgtgccattgcactccagcctgggccacagagtgagactctgtctcaaaataaataaatataaaaacctgtaaataatgagcactttacagtgacttcattcattcgttaattctcaaggccccaaggataggcagggagcagatattggtggtggtggaggtggagcaaggcccagaggagacagtggttcattcttcctctatccaatggatatttattaagggccactccatgccaggtgcctcgctgttggaaggtagtgacagggacaccagggacttgcccaggatcacagtgggtgggagaaagtcagggctggcccctgggtcctcaacaccaaggacagtagtctcattgccacaaaaagagaccggagtggtttgtccctttggaaaaatgactccctcttaggattctagccttccctgcaggcattcatagttaattcttaaagacatcaaaaacccatattagaactccagtaatttttttaatgaaaacggaacctacttatcacaaaagctcaaccaataaagagaagtacaaataagaaagttcaaaatgtggaaattttactacccagagaaaaatgctcttagcagaggtagcagagctaagtggtcaagagcacagactcagaccaaagtgcccagggccacgtgctggcttgcaacctaaccatgctagagtgtagcctctctgctgcctatttctttacctgcaaatctgtataatggcagcacctgtcacacatagggtattaaatgttaggagcatgaaacaagctaaccatttgtggagtgcttagcacagcactcaacacagaataagtgctatttaaagggttgttcagtgtatccccagacggggctccatgcagacataccacacctgcttatggtcttaggacctgattttatatatgtatatacacatatatatgtatatatacgtatatatatatgtgtgtgtgtgtgtgtgtgtgtatacacacatatatacatatatgtatacacacatttatacatatatatatacacacatatacacactaaacaagatattccaggcacattgccatgtctataagcttctttctataagtaagaatttgatttaggctggagacagtggctcacacctgtaatcccagcactttgggaggccaaggcaggaggatcacttgagcccaggagtttgagaccagtctgggcaacttagtgagacctccctaaggtgttgcaatgtgcagctgtagtcccaactaattgggaggctgaggtgggaggattgcttgagccttgggaggtagaggttgcagtgagccaagattgtgccactgcgctgcagcctgggcaacagagtgagaccctatctcaaaaaaataaaaagaatgtacgtttcatatcggtagaaactttctggctgtttcaggtcctaaaagagtgcttggcacataatagatgtgcaaaaaaaaaaatgttgaatgaatgaatgactctaatttagtcaatatccatgacaaagggatctgttacatactgggtgtgtgactttgagcaagtatcttcaagcctctgaacttcagtcttctcctaggtttcatgggtatgacacagataacatgtactgagttaactctgtgctgggactaatttgaagtggtttatatggaatatctcctttaaaccatacaacagcatttgaggtactattattagtccatattaatgtggagttagctgaggcataaggagattaagtaacttggctaaggtcacaagtaagaggtggagctaagagacaagtcccccaggcctctgataccacagtgcattcacttaccaccactctatactgcttttctaagataacccacccttggccaccgacagtagaaggaataagtacatggtggtacatttgtacaatagaatactatacagcaattgagtggctcatgggctgggaaccgtggctcatgcctataatcccaacactttggaaggctgaagcaggtggattacttgagctcaggagtttgagaccagcttgggcaatataccaagacccccatctctaaaaaaaagaaaaagaaaaagaatactatacagtgattaagaagagcacattgatgccaggtgcggtggctcatgcctgtaatcccagcactttgggaggccaagacgggaggatcatgaggtcaggagtttgagaccagcctggccaacatggtgaaaccctgtctctactaaagatacaaaaaaaaaaaaaaaaaaaattagccaggcatggtggcacgtgcctgtaatcccagctacttgggaggctgagacaggagaatcacttgaacttgggaggcggagattgcagtgagctgagatcatgtcattgcactccagcctgggtgaaagggcaagactccatctcaaaaaaaaaaaaaataaaatgacatcctgaatttttatggcaaccctaaagtttgcatatgtatgattccatttatgtgaagttcagaaataagcaaaacgaataaatggtaatagaatcaggagcatggtttcgttgggtgggagtaggagtgagtagaaaggatattagaaaagctttacatcttgatctggatggaggttacctgtgtgtatacacatgtaacaattcaccaagctgtacacttaatgtttttaccttttacaacacttgtgaattacaactccataaaaaaatatttttaggccagttgcggtggctcatgtctgtaatcccagtactttgggaggtcaaaggccagcttgggcaacatggcaagaccctgtctctacagaaaaattaaaaaatcagccaggtatggttgtgcatacccgtagtcccagcttcttggaaggctgaggcaggaggattgcttgagcccaggagatctcggctactgtgagccgcaattgtgccactgcactccagcctgggcgacagagtgagaccctgtctcaaaaaaaattatatatatatacatatatatatatgtgtatatatatgtatatacgtatatatatatgtatatacgtatatatgtgtatatatatgtatatacgtatatatataatacacaaattttttaaatcccacagagcgatatgccctattataaaatctttgataatattctctaactgatgggatgtttgcaaggttaaaatgtgataaagtttgtgactctcttgctacattttaggctctcatagtaagaactcaatgttaaatgtaaacagcattgttaaatgtaacagcagcattcatacagcatcgttattatcatggctttttgtatttctctctattgctgatagactggagcgccctcgagtgtttaatttgttatagtacctcagttattacaaagagcaccctaaacccaagtttgtagtctcaatgccaaagggcaatgcttttcttttctttcactccagtgccacataaaaaaggaccaaaacatgacctcctgggagcaaagaaacaccaggttgcctaaggagaggtgaactggcccaggctggaaacagagcaggtcaaatctcacgccctgatcagtggtgggatcacgcctgtgaatagccactgcagtccaaactgtgagactctgtctcttaaaaaaaaaaaaagtagcaaaattcacatcaaatcaatgggtcccaaggccaactcaagccctgcccatggtcactccctgaaatgtgtcagaaggaaggcagaagggaacacgcagctctacctccctttgatgcaagcacattgcaaatatcatctcgtttcacaggaactcacataatatttgaatgtggcatcatactgactacaaaaatcctttcatattactaatagtcacagctagctttcagtgacagtttcctgtgtcccaggtaccctactaggagctagatgtcattgttagctttgatctttaaaatggcctgtgaggcatatattcttttgtagcctgcttttttcccttcagcagtacgctttgggcatctttccatgtcaataaatagagctgggtcggaagtaactgattcaaaggctgagaaacttaaacagtcagcagccactgcccaggtgaagatcaataatagttaacatttattgagtgctttattacacaccaggccctccactcattgtttaaggtgaactctctcgcatttgatccttgaggcaatcccaaggtagcttctattattattcagatggggaatctgaagcccagagaagcaaaggaacgcagtcaaggtcagacagctggtgttcaatggcagaggtgggattcaaacccaggtccctctgattcaggcgctgggctctcagccagcacatttggaggacaacatggaggaggatgtaaggggagtcttcgaagtgggaaaaggatccactagcaaaggctgaagacaggcaggagggtggtgtgggcccaggccactgtcctccatggaagtgacagtaaggcttcctggaggtgacaccgtttggactaattctatgtctccagacaataaaggaggtctttttatagcttaccagttcctgggcatacgtccagtgagacatacgtgggttcaaatcttcattgtgccactctagtttaaaaaaaaatcagcattatcgccagacacagtggttcacgtctataattccaacactttgggaggccaaggcaggcgagtcacctgaggtcaggagttcgagaccagagtggccaacatggtgaaaccccatctctactaaaaatacaaaaattagctgggcgtggtgatgcacacctgtaatcccagctactcgggaggctgaggcaggagaatcatttgaacccagaaggtggaggttgcagtgagccaagaacgtgcctgggtgacaaagtgagactcagtctcaaaaataaaaataaaaaataaacagcattgttgagatataatgatgttcaataaactaaacatacttaaattgaataatctgatgagtttcaacatatgtacatacccaaggaaccatcaccacaatcaagatgccaagtgtttccatcgcttccaaaagcttcatgctcgtttataagccatcccccattcatcccaccaccccattcccaggtaaccatcaccaatataggttgctttctttcactatagatggctttacattttctgggattttatagaaatgaaatcatgctatatgtactctgtcttaatttttttttttttttttttgagacagagcctctctctgttgcccaggctggagtgcagtggtgaaatctcgggtcactgaaacctctgccccccaggggttcaagcaattctcctgcctcagccttagtagctgggatcacaggcgtgcgctaccatacctggctaattttttttttttttgtatttttagtagtctcgaactcctggcttcaggtgatccgcccacctcagcctctccaagtgctaggattacaggcgtgagccgctgcgccccgcaaatatgtactctttctgtctgacttctctcattcaggcatgaaccaccatgcctggccatttcgccattacttttaacggcaaaaaccgcaatcacttttgcaccaacctaatagatctcacaggtgaagcacggtggctcacacctgtaatcccaacactttgggaggctgagacgagcagatcacttgagcccaggagtttgagaccagcctgggccacatagcgaaaccgtgtctctactaaacaccaaaaaattagccaggcatggtggcatgtgcctgtctgtagtctcagctactcaggaggttgaggtgggagaatcgcttgagccctaaggtcgagctgcagtgagccgtgatcgcaccactgcactccactttgtctcaaacaaacaacaaagaaagatacagaagccatagtttcttcacccatgcccctgggcatgtcattgtttcccccagtttttgcctattacaaataaaactgctatgaacactcatgttcatgtctttgagaggacaaacgctttcattatgcaggaatacaattgctggtcacataagtgtgtgtttaactttttaagaaactgcaaactacttcccagtctggcctttttaattatagtcattttagatgcactcattttttttaacctgtggatctaatagatggtttcttagactgtctggacctcagtgttttcatgtgtaaaatggagataattggccgggtgcagtggctcacgcctgtaatcccagcactttaggaggctgaggcaggcagatcatgaggtcaagagatcgagaccatcctggccaacatggtgaaaccccatctctactgaaagtacaaaaattagctgggcatggtggtgtgcacctgtagtcccagctactcgggaggctgaggcaggagaatcacatgaacccgggaggcggaggttgcagtgagtcaagatcgtgccactgtactccagcctggcaacagagcgagactccatctcaaaaaagaaaggagataattacatcagttttgaaaggtagtgaagacagagtgaactagcacataagcacatatgcagcacatagaacagggactgggacatagtaggggttccataaacggtgggtttttgttgttgttgttgtttttgagatggagtctcgtgcagtgttgcaatctcagctcactgcaacctccgcctcccaggttcaagtgattctcctgcctcagcctcccaagtagctgggattacaggcacgcaccaccatgcctggctaatttttgtatttttagtggagacaaggtttcaccatgttagccaggctggtctcgaactcctgacgtcaggtgatccacctgcttcggcctcccaaagtgctggattacaggtgtgagccaccagcctggccaagggtgattattttattacaattgaaccacagccatcctatgatctggccacttaccccaggatacagcatcctcaactagatggcaaaaagccacttcctttgcacttagtcagtgctgttagcctggaggaataacaatggcaccatcgattgtgccaggcactatcctaggtgcttttgtatgttgaatccttgcaaagccctgtgaggtgggtcagtgtttgccttctgtatgacagatgagaaaactgggatgtagtaactagtcattggccaaggtcacacagcagtgaagtaatggtgctgtgatttgaatctatgtagtttgatttaggatctagaagtttcgctaatggattacctagctcagaactagtgaaagagcccagtcacaaaagcacctcctgatgcccaaaatcattttcagctcctcagacacagagcctgaagcaaagattaggtactgtgtgatttataaaggaaagaacctgtaagggatgaagggaagcaagacagggagggaaacaagaaaagatgtggtctcaggtaaagtctagcaaaaaggctggctttgtgtacctctgtacgagtcagctgttggctgccagccaccctgtgggtgaggggaataaactccagggtgaggtgattcctgagatggcagttctccgtagaaatggaaatagtaagccattcgaagccaacaactgaagcatctggggggatggtgttggtgtgctagcccatgaagggctcaagaggttcccagaggcacacttcttgcctgcctaatgaatcaagttctagaacattctggaacattcacttcctagacttgttttggagaatcctccttctcactgagaccagcatgttgaacaaacccagcctgtgacataatcaaagcataccttaatttgtatctcccagtgtcctttctaagatgtatttggtagagaaacattttccctgccactgggtgaaatctccccattattcttctgcttgttctgaggaaacaggcaattctatggtcactttaggtcacaaacacaacctcaatttagaaatgagaatgtccagtcaagcttctaaccaaaattcccaatttgatttgggtttaaaccttctcccctcaccctcaggcctgcttcagggaggtggtgtgggtgactccttctctatctctccttccctcacccacccgtggggtacagtggggggtgttggagatggcaaggggagaggaagggtctcccttgagctgccaccatcctggctggcttcaagctgcccctttctgtcgtgggctccatggagatggccactgtcacaggggccctctcactcttaaccttgggggatgcatctctcctcataggggtcccttgcaagtccttcgtcagcccttaggaacccaacatccaactcaagcttcttgctgctgccacacctctgcccctccaggaggctctaggggacaggacccaagaggaccccttgtaggtgctctctgccaacactggcccatgggaaacactccagccagcagcctgtactccgaaagtcctgggaatgtggcttaccttagcacgcccacactggctccttcaccagttcagccaggcagcccgtttctctcagcctctagatgtccatgcccacatgagaccactgggccccctcataatggccacacattattctctacatatagtggcccctctcatggaagagcccccatgaccccattccacccttccagggagatggtcaccaaagaactctttgcttcctcttcccatcctaggagaatgtggtgggtataggggtaatagtaaatgtgggggttttgggtagccatggccaaattttagcagctgtgggtttggactgggctcttttttgttgttgttgttgttacgtaaattaacccatttattacaggccagtgatgtctcaaagagtagaggagcgtctactggtctttcaactccttcaggcttctgatggcggactttaccgtgatagcggaggtggtattgtatgtccaggcaccgccagccactgtcttcacgcgggaaccacagtgccagatccccgcagctcatctcttcatcttggttttgccacagaaagagcaagtgtacttggcctgctggctgatttcaactttcttcaccattttccagagggaggccccatagcgggtcccgtatttaccgacgatcccgactttcttggtaggtttggccatgtcaccgcgaactaggtccgagcccagagagttggactgggcttttaaaaaacagttactggttgtcacagcagagctttctagaaacatcttacaagtcatgtccaccacccccagcctcagttttttcatatccttactgcgggtggcagcaccttactgggtgggggtttgtggtgagggctgagtgaagtagtgaatttgcggagctaacactccagaattccacaatcacagacctgcaaattccatctccgtgggaccatttacaagtgatgtggcttctctgagtctgtttactcctttgttaaatggaagagcctctactccattgcatctctgtaaggttagttaagtgaatacatatgacatgcttagcacgggacctggcacctggtaagaactcagtccatgctgggcgtttttaatacaacggtgggtggctggtactgacggaggggatttgggatctccaccccttccgtttccctcactattccaggccctgttttggaaatgcttcagccaggctgggatccagggcccctgggaacagagaggacatactgtacctccaagcagccatgctgactcaggttaggaaatcaatgtgtgaccacaaaaacacagccaggttcttcccacttctgggaaatctgcacagccaacccatgggcatctctttaccctgtcccgagaggtggccagcttcgttctaggacctgattctgcagcttgtgagcacaaggctggcacatggagaaacaggagtctctcgctccttagggaaccccaggcccggggtcacaagctttgcacgaccctctgattggggtcaaacatgtctggtgtttgcgaagcctctgacttcccccagcctgcgtctggacacttctcaagccaagccaggctccggaccactggttgggcaacgcatgacctcaaactgggtcagacccatcagatgagcatctgtttaagagtataggacactttgttctttagaatcccaagggtcagagtatgaaccctccccgtccccaattcaaactcctcctccatcacttactgccatttacttactctgttactttgagcaagtttttcagctctctgagttctagttttcctagccaccaaatgcagactaacaagtaccttcaccttccagggttgatgtgagattcgggtagtgaatgtcaaagaatggcacacatattagcaggcactccataagggggagttattattgcaaacaggggcactagacaccaagtaaaaaacagtatggtacatatgctacagtggatgagagggcagagctgaaagccagactgcctgggttccaaaccaggctactggccaggtgcggtggctcatgcctgtaatcctagcactttgggaggccaaggcgggtggctcacttgaggccaggaattcgagaccaacctggccaatatggcgaaaccccatctctactaaaaatgcaaataaaattagctgggcgtggtggcatgtccctgtaatcccagctactcaggagactgaggcaagagaatagcctgaacccaggaggcagaggttgcagtgagccaagattgtgccactgcactccagcctgggccacagagtgagacgctgcctcaaaacaaaataatacaaaacaaaacaggctgccctgccacctcctgtgtggccacagggaaagtctctaagcctcagttttcttctctgtaaaatgggaataatcataatacagttataaggattcaattagattagttgcactggaaacagtgcctggcacatagtatcacctaataaccattaacgattttttattttgttttatttttccagtctctgccccagttgggaagcatgaactatttttaattagccacacaagttagtaatgtcggtaatggtgctgaaatcacacgggtcagtgttttgaacaaaattcacatggaagtcatatttagtgagcatctacctacatacctggtgctaacagaaaccatacatttagatacatgtatatgtacatgtaaacacacatatgcacacacacatagtgtgaagtaagtgttgctgtcctcattttttaaaacctttatattatagagcaaaacagttgcagaaaaccacacaaattaaatttgtagcagccaggtgcagtggcttacacctgtaatcccaccactttgagaagccgaggtgagtagatcacttgagctcaggagtttgagaccaacctggggaacatggcaaaacctgaaatgccatctctacgaaaaatacataaattagccaggcatggttggcacgtacctgtagccccagttactcaggaggctgaagcaggaggattacttgagtctagggaggtctgaggccacagtgagctgagatcacactactgtactccaccccaggcaacaaagtgagacactatctcaaaaaaaaaaaattgtagcttagtgagttatatcaaggcaaacaccctgtaaccaccaccccggtcaaaatacagaattttttcagccacctcagggttcccctccccacctcaccaggtactccataccaatcacagcccatccccccaaaataatcactaatccgactattaattacttccttgcatttcttcatgacttaatcatctgagtgtgcattcctagatgttattgtttagttgagtccactttttatttttatttatttattttttgttgagatggagtctcgctcaaccgcccaggcagtggcatgatctttcttggctcactgcaaccaccgtctaccgtgttcaacagattctcctgtctcagcctccccagtagctgggattacaggcacccaccatcatacctggctaatttttgtattttagtagagacggagtttctccatgttggtcaggctggtctcgaactccggacctcaggtgatccgcccgcctcagcctcccaaagtgctggcattacaggcgtgagccgccactcccggctaaacatatttgataagtttcaatcaactgcaagtattgtctttgttgcagctaaaattgtttcatccacaggctggcttgtaagtccttttggtgtgaccctggtagccttcgatagcttccttgttaattggcgtgacaagatattccaggcttattttgtatatttcctgctacagatctggaatgagtaatttcttcaagaagtctttttatttgtattaatcaaaactattatctgggtgcaagatatgctcattgctacaagattgattatggtttaagtctttttaatagctagaactaggtattatatatatgaatacacgcatatacatttcctttaaaaatagtttcgagttcacattgatatatccaatgtaaatagagttttataggatgtttatggaatctattctgtattacacctgtagttcctttcttccacacttggaatctttcattttcaaggatacaggggctgataaaatggaaagatgctataattactggttaaaatgactcagtaattcacaggggttaaaaactcctttaaaccttaggttgtgtggcaaacaccttacactcgcccactactggagttggcaaacgctttccagtttcagctgctgttttcccaacaacacgtgaatacatgttgcaattttagcactctccatgtctcaggcccgccagacaccttgctgcttcccttctgtttctactgcacagagatgccaatggcatgcaggccttgtagctgttggtgatttgtccccacacgttttttggagttcatgaagatgccttgtcacttagttttgttgtaaatgtgtttatgaatttttttctatttttatttggggatttggggatattcaaatctatgctaggcattattgcctccatctttccagaattccccagctggtattattttcaccaatgaggaaactgagccccaggggaaatgtgatttgcccaagatcacacagccagtgacagcgcagagatgcatgtgaggtcacctgctttcatgcaaggtacagagaagatgcctgatatggaccactccctcctcatcttcctccctatttccactggtcagtgtctttacaggattctggggggtttggtggggggcttttttgtttgttttttgaggtggagtcttgctctgttgtttaggctggagcgcaatggcacgatctcggctcactgcaacctccacctgccgggttcaaacgattctcctgcttctgcctcctgagcagctgggattacaggcacccaccaccacacccagctaatttttgtatttttaggagagatggtgtttcaccatgttggccaggctggtcttgaaatcctggcctcaagtcatcctcctgcctcagcctcccaaagtgctgggattacaggcgtgagccaccgtgcctggtcccatgattctgttattgacaatcaaatgaaactatccatgcaaagagcttatcactgtaccaatgaaagcattcagtgactggtagcagttagtataggattttatggttgatgaaaccaagggttggagagacagataactgttccattgttacacagctggtaagtgacacaggctttagactcaggtctgtctgaccagaacctaacattctttctcccacactagttcttaattcagagcagctttgtctcccagctggtatttggcaatgtctggagatacctttggtttttatcactgtgaatgtggagtgctactgtcatctagtgggtaaagcctaggaatgacattaaacatcctacaggacaacatctctcccatgcccccgaaacaaagacttttccagctccaaatgtcaatagtgctaatgttgagaaattatgccctatactgtggtgccatcctaaataagccttgccaggcagggcacggtggctcactcctgtaatcccagcactttgggaggctgaggcaggcagatcatctgaggtcaggagtttgagactagcctggccaacatggtgaaacccgtctctactaaaaatacaaaaattagccgcgcgtagtggtacacacctgtagccccagctactagggaagctgaggcaggagaatcgctggaacccagggggtacaggttgcacagagtcgagattgtgccactgcactccagcccgggtgacagagtgggactccatctcaaaaaaaaataaaaagaaaataaataaaactaaataagccttaccttagaatcaatactaaggctggtcctaggagattttctgagctcagaatcacaggccctgaacagagacagctcaggcatgtctagcctcctccagcaggtatgcaatgcaatgtcaagatttttttcttcagaggctggatgaaacgaggagagcaagatgtttgaaaccttccaaaccaagacacagggcaagccgccccctggtgatctttctgcttgagagggggtgatcatcaccgataaacagacatttcatgatacaatgtgccagaactctgcacatgccattcttttttttttttgagacagagtctcactctgttgcccgggctggagtgcagtggcatgatctcggcttactgcaacctctgccccccggtacaagcgattctcctgcctcagcctcctgagtagctgggattacaggcgtgtgccaccacacccagcttgtttttttgtgtttttagtagagacagggtttcaccctgttggccaggctggtctcaaactcctagcctcaagtgatccgcccgcctcagcctcccacagtgctggggttacagatgtgagccaccgtgctcgacctgcacatgccgttctatgacatcctcccaaggatcccctctaaacaaaggccatatccccattttatacataaggaaatgagtcttttcaagaggttgttcagactccataaattctgagtgtccaaggcagagaagacagacatcaaataccagctcaaacacttagtcatcatgtgactttgggcaattttttgtccttctctgatcctttttcccaacctgtagaaacagagacagggctacatgacctttaggacaaagtaaaatttgggaccatggtgtcatacaggcttgaattgatacctagctctctctttcatatcttgagcccttaggagactttctctttctgaatattttacattattttattttattattattttttgagatggagtctcgctctgttgcccggcctggagtgcaatggcacaatcttgactgactgcaacctccacctcccgggttcaggtgattctcctgcctcagcctccagagtagctgggattacaggcgcctgccaccatgcctggttaatgtttgtatttttagtagacacgggatttcaccatgttggccaggctggtctcaaactcctgacctcaagtgatccaccactttggcctcccaaattgctgggattacaggcatgagccaccaagcctggcctctttctggattttagtttcctcttctgtaaatgggacaatcctagctcgctgttcacagggtcattgtaaggtgaaattaagatcatacaagcacagtgcctggtatatataattcaaaaagcagaaactctttttgttgtcattgtttatcggagatgttctaatcctgatataatctggttctctaaaatgtaataccaagaggaacaagaaataatggccctcagttgagggaagaggcagggatttctggggcatctctgaatcctctccctgccctgcccttgagaccaagttcttctcctgctggcaacatctaggattgccatctgggctccaggtaccagtagtaggtcctaggtttgggttaaggagaggggtgaatttattccaatacctaggacagcctggttaggacagggtcatccctcaccctttgccacaagagctgccatttggcagggcgcaggagaatggcttgagcccaggcagcctcccaggtggctgggattacaggcctggctaatttttgtatttttagtagagacagggtttcaccaggttggccaggctggtctcgaactcctgaactcaggtgatccacctgccttggcttctcaaagtgctgagattataggcatgagccaccacatccggctgttttggggggttttctttttgagacagagtctcgctctgtcgcccaggctggagggcagtggcatgatctcggctcactgcaacctctgcctcctgggttcaagtgattctcctgcctcaggctcccgcatagttgggtgtgacagccggaagtgggggcctcggattacaggcgtgtgccaccacgcccaactaatttttgtatttttagtagagacagggtttcaccatgttggctggggtggtctcatcatactcctgatctcaagtgatccacctgcttcagcctcccaaagtgctgggattccaggcgtgagccactgcacccggccttaccttacgttttaaaagatctcacagatgtgattaatgtaaggatcttgagatggtaagattatcctggattatctggctgagcccaatgtaatcccaagagtccttataagaagagggaagcaggaggatcagtcagtagtagaggtgacaacagaagccagaggttgaggtgatttgaagaaggggccataagctaaggaatgcaggtggcctctacaaactgtaaaaggaaaggaactgatgcttcctccaaatccccaaaagaatgcagccttgccaacaccttgattttagacttttgacctagagaactgcaagagaatatatctgtgttgtttcaatccatgaagtttgcagtaattccttgtaacagtaacaggaaaataatacatagatttagcaaacaaaacaaaatccaggatgcccagtagtcatatttgaatttcctataaacaacaatttttaaagtataaatgtgtcccaaatgttgcataggacacacttatctgtgtgtatgtgtgtgtgtgtttggaaaggaacatgcttaaatgtttatctgaaattcaaactgtagtgaatgttatatattttgtctgtcaatcttagaagtgatgaaactgagagcaggagtcaaaactcatgattcccaggtcgcctccatactgctgccccctgcccctcaatctggcagaaactgccacgttcttgtggccctcatgggtcacttcccatcttcttgggactcctcttgcccctggggtaggaaaatgaaaagactgtttaaggtcgtttctttaggctcagagttctcctggaccaccagaggttctgcctcagagggacctaggagatttgcctcaaagttgcagttgcacaaaatacttgcgggcggatcttaatggactggggtgggagttagtaaagcctttgtctggagggaacgtaatgaaccccaaagcaggaaaaaagtaattattgaatcaggctccagagcaagaatcaggtttcaggtaaggaaacggaagcacaagaaggaatggggacttgctccaggtcactcagttaatgacagacagatgtcccctggtttggagtctccctttttggagcagctagtcctgatagcagccatagtggggggaagtctagaatgctaatcctgaggtccgggtttgaagccctttactgccttgattgccagtttccctttcctgaaataggggaattgcataaatatgaggagttaatgagatcatggatgttaaacaacaggtacatgttagcatgttcttggaaaatggcagcttctttccttccttctctgagcctcagtttccccatctataagccgggtttgacaagcggctggtgccccagctcctcccagccactccaggtccgcagctcggagctccggcagccaggtggggactgaacaccaacgccgcggggaggcgtcgcacatgcgcgctcctaggcggagccccgcctcccacgccctggatcgtcacttccggcgcgagaggccgggcaggccgggcagggagtgcgggtcggttctgcgtgcgctgccggacgaggctcccgccgccgattgacccgcgctccgcccgtagtcgggccggtgagtgcccgcgagcccatccgtgtgccctgggagctgaggagagggacccctgagagggaaggataaccggaagtggggaccagaggagcgagagaccccaggaaatggggacacctggggagggggtgacagccggaagtgggggcctcggaaggttgtccacgggatatggggtctcgggggctctaggagagatggcttcctgacctctccttgttgagaggaaggggtggaaaggaaagtgatgctccagaaaggatgggctccaggtgggggagatctttggcttcaccgttaccaatggtgtctgcatctcactcatatgtccgcctgtcagctcattcaccagcctgtgactgagtcctgctgagcgctcggcactgctgagtccctggagagtcaacatgaagctccaggtggagggtacagattagaagcccagggtggggctagacgcatccttgctctgcctcaccgggtgtgcccccttgggcgaatcgcttaacctatatcctccgctgatgtgtacagaccactgccatgtgcccggcactgggggtggcagtggacatggcagacaagccctctgccctcgtggaacttagattctaggggacagtcctttttgtcctcctttgtaaaatggcaacagtaatagcgctctcaccaaataacgtgaagattaaatgaggaaatgggtaaagggcttagcaatgcttgatacatggtaaaatgctcaagtatgcattctcttcattccactataatgtaagctttattaggcaaggaattgtattgtttgcgtctgtgttcccagtgcctgtgagcacagtgcctgacatatatggtaggtgatcggtaattatttgataaatgagtgcgtggtgaaactgactctagataaatgcccatagcattggactgtaatttctaaaaaagaaataggaacccagttctgtggaaaactggagggaatcaccctcagggagtttgggaaggattcactgaggtggtgacatggcagctgagcctgagctgtcaagttaggaacaaattagaagaggaaattccaggcagagtgtatcagaagtgcacgagttattccaaggatgatgggttattagtttgttttgactggcatttaatgtgcatcaaggtggggtgcgatggaaaatgaggctggagaggggctttgaggtgaggcttgtaccttgtgaacactgatgtttgatgggattgcaggcatctcttggttacttccatagaaacaaagccatagttgttccattcctcacttagcatacctgtgccaaccagactaaagtcattcaacaaatatttatggagtgcagattatgtgtctaacaccatgttaggcgctgggtttcaggtgatgaacaagacaaacttggatgttgctcacaaattgccaacagacaattgcaacagggtgggagaagtgcgggggaggcacctaacctggctgggggtcagtgaaggctacctactccaggccaccagcatctctcagctggattattgcaatagcctctaaatggtctgcttcagtcctcactcccttagagtccattctcaagacagcagattggtccttttaaaatatatttttatttatttatctatctatctatttatttatttatttatttatttatctgagatagcgtctcgccctgtcgcccaagctggagtgcagtgacatgatctcggctcactgcaacctccgcttcctggtttcaagcgattatcctgcttcaacctcccaagtagctggcactacaggcccgcaccaccatgcctggctaatttttgtatttttagtagagacagggtttcaccatgttggccaggctggtctcgaactcctgacctcaggtgatccatccacttcagcctaccaaagtgttgggattacaggcataagccaccacacacagcccaagaaaaaatttaaaaattagccaggcgtggtgtgtgcctatagtcccagctacctgggaggctgaggcaggaggattgcttgaacttaggagttcgaggttgcagagagctatgattgcgccactgcacttcagcctgggtgacagagcaagaccctgtctctctcttaaacaaaaaagtgcatgagttcaggtcctctaagaagcagacactaggatgaggttagacgtgctagaaatgtagaggcaacccttgcgaaggacagcacctgggaagggagctggagaagtcaggaagagccactggcagtgatgcagatcagctcctgtgaaggaggtttgggcagcaagtctctgactgcagggcagtcccaacaaaggtttggccaggccctcaagcaaacgctgcctgttagaggagtcctatgtctcactaaatcattggctaggagcagtgaggccacagaagggctgtggaaagttctggcttcccctggatagtggatctagagggacagccactggggccctttatcaattacgttttcccagcagatctgaccggcacatattcccgactgccacgataagttacatgggtgtgtagtaaaaaattcaaacagtatagtaaaaatcctctttctcatcttaaatcttcacttgtccagttctgttccaagagataaccattggtaagtttcttatatctctttccagaagttttgtgtgcattcacaagtgtatgtgtatagtttaaaaacgtgattttctgtacactattctgcaacttgcttttttaatatgtcaattcataaagatctgcctacttttcgctttttttgtttgtttgttttgagagggagtcttgctctgtcacccaggtgggagtgcagtcatgatctcggctcactgcaagctctgcctcccgggttcacgccattctcctgcctcagcctccctagtagctgggactacaggcacctgccaccacgcccggctaattttttgtatttttagtagagatggggtttcaccgcgttagcgaggatggtctcgatcgcctgacctcatgagtcgcctgcctcggcctcccaaaatgctgggattacaggcgtgagccaccgcgcccggccccctaattctttttcatgactgactagtaccccattaatatggtaatattacttaaccagtctcccctgataggcagttaagatgtttccaatcttttatcattataatcaatacttgtgaaggccatgtgcatattatgcatatatatacaagtatatgtcctagaaatggaattgctgacccaaagggcatgtaggtttacattctgaagatattgacaaatgccctccaaagaggctgtcaatttatactcccagcagcagcaagcatattagagtacgtttatttttgccaatctgaatctgagttgtttttttttttttttttttttttttttttgagagtcttgctgtggctggagtgcagcagcgccatctcggctcactgcaacctccacgtcccgggttcaagcaattatcctgccttagtctcccaagtagctgagattacaggcactcaccacacctacctaatttttgtatttttagtagagatggggtttcaccatgttagccaggctggtcaggtgatccgcctgccccaacctcccaaagtgctgggattacagcatatacattacagttgttttaattcacatttatttaatgatgaataaggtcgagcacctattaatacatttataaggaaggccctggtgtttattagggagtgtatagtctgctgtagctgctgcctgcctccctggggactaacagcagccggcctggggtcagacttgcgtgtatggtttagatccagttcattgcccccagttgagaaacactgccctgaggttactcggtttttacagaagtgttcctgtcccctacactgtactgccctaggatttgaaataagcacttgttaactttgcttagggcttctctgttggcagggaccttggtagctaatgtccgaagaaagtgactctctgagaaccagcccttctgtggcctcactctctgaaaatgagctgccaccaccacctgagcctccgggctatgtgtgctcactgacagaagacctggtcaccaaagcccgggaagagctgcaggaaaagccggaatggagacttcgagatgtgcaggcccttcgtgacatggtgcggaaggagtaccccaacctgagcacatccctcgacgatgccttcctgctgcgcttcctccgagcccgcaagtttgattacgaccgggccctgcagctcctcgtcaactaccacagctgtagaagaagctggcccgaagtcttcaataacttgaagccatcagccttaaaagatgtccttgcttccgggttcctcaccgtgctgccccacactgaccccaggggctgccatgtcgtctgcatccgcccaggtatctccctagactgttgtggggtgtgtgtgtccagtccttctgcagtgtgtccattcagcaccctgtcctcctttccaagtcccttttttacccctcctttgttatagtcaaggctcttttgattgcagataacacaaacctactcaaaccaacttcagaaaaaagggaggatttagtcgaaggagacaggagtccctcccagaaccagagagctgaaggcgtggcagcttttactagggcctagaaccaagaaccagaatgccaccaggagccaagacagccgttctccctgtctctgcctgacggtctgtgtatccttcagccacacatttctgccttttgcatatcttcttcacactttttctgtgtatggctgtcccgctcctgtgcacgtagttaaatctggcaccctctcagctctcaggtttgcctgaccaccaaattaagttcctcaatgcagattcccaatttctagtggggagcatctggtggggcctaagaatctgcccctggccataggatacaagcatgactgccagggccctctctgagccctctttgtgaataggttgaggtacaggtatcagtgcaagggtgcggactgggcagacacctggaaaggtgcctcctctgtgcctcctccaacctttccttcctttcctctattttgtgaagccactgacaggattcactttggatttgttttttgatcttagcatttcatggcagtgattaggataccttacatttctttgtcatggtggtttacgaatgggggctccctgccactaaaagagcatttagaaatactcccctgccaggcgcagcagctcatacctgtaatccccgcactttgggagggtgagggagaaggattgcttgaggccaggagtttgagaccagcctgggcaacatagtgagaccttgtctctacaaaaaatttaaaaaaaaatgctctttggggagcatttcaacacaatgaccaggggctgccagaactcaagatttctgattcttaggcctgttctcttccatgacaccaaaagcgttattaaactttggaatgttctactccattcctagcctcaacattttccatcagaccagagctgagagaaaaatggaaagtaagatgcaatgttctccccaagtaagccagggaatgagaacacactaatagccctctttcgctcattcatataaacgccctcttgaagggaagtttgatggggagtggacacctccatgcactttcctccgcctttactcattccccaaactctctttggaggctaaaccattctcttcagactttactatgtatgtaccaagaccactgttaatggcttacctgccattttaggtacttgccaaaattagtggtgtttattttaaaataagcaatgcagtgcagattttagggcgccaggagacttagaaaccagtcagcaggtttttctgctgctcctctgtactcaactcataagaatattacaacacagtcagatattacaacactgattgcacctttgcttgtgtagtttcaaccctttgcttgtgagatgaattttttccccatatgtctggagcagatctggacccctttccactgacccagcgttttaggaagaggcatacacagaaaggtttcttctcaattgggtatcagctttgcctttgttaaagctcttttgagacatgtgattgaaagggatgatatccagttacatagaggcagggttaattggcagcaacgttagacagcaagctggcacaatttggggacaaagatctttcacgagaattttgcacatatcaggtcaggtgtggtggctcatgcctgtaatcccagcactttgagaggctaaggcaggtggatcatgaggtcaggagttccagaccagcctagccaacacagtaaacggcccccgcctccccccaacccccaccccctgtctctactgaaaatacaaaaattagctgggcgtggtggcacatgcctgtaatcccaactaccccggaggctgaggcaggagaatcgcttgaacccgggaggcagaggttgcaatgagccgagatcacgccactgcactccagcctgggtgacagggcaagactctgtctcaaaaaaaaaaaaaaaaaaagttttttgcacacatcacatatcccattgttggcaaatgggaagttttatcttttaagaaagaggcacatagattttgctgggattttcttgagaacagtggttaacagtaaaaagtgggcattctcattttttttttcccaaagagaggaaagaatcattaaatacatggggtgtattaaaaaagtatccaccttggaaagaggaggggaacatagcactatgttccatccttacaatacctccgtcaaggtcgtgtatgagtcaagactcagctttttttttgagacagagtctcgctctgttgcccatgttggagtgcagtggcgcgatctcggctcactgtaacctctgcctcctgggttcaagtgattctcctgcctcagcctcccaagtagctgagactacaggtgtgcaccaccatgcccagctaatttttgtattttcagtaaagacagggtttcaccatgttggccaggctggtcttgaactcctgacctccaatgatccacccaccttggcctcccaaagtgttgggattccaggcgtgagccaccacatctggccaaaactcagtctgtgtggcaagtgacagccaactcacgttagctgaaacaaacaaaaaaacctcagttgctcagataactgaggtctagccgtatttccattcaggggcccaaactctggcactggaaagctgtccccaccactgctgtcctcaacaggggcttcactcccaggccagctctcttgcctcatggggcccgtgaatctcagactcaccgcctcaaaactacaagagggaagacagaactctttccaaagggccaggggtcctagaattgagtctccttgactctgcttgacctggcttggatcacacactgtggccagaaggatgtgctgtcagattggccaatcaatccccagtcacttgctcacctctgaagtcaggagtcaagtcagttctatccaaactgcatggctagagtgggaggaggtggttccctaaggaaaatcaggttagtgctatgaagataaggggaaatacatgatggcagaaagcacagatgtccatgaaggtaggcattatcaccctattctacttatgaggacatcggggctcagagtgaggtattatagtaacttgcccaaggtcacatagctagtaacattcaaacctcaggtgtgtctgacttcagagtgcatacttttttttatatttttgagacagggtctcaccctgtcacccaggctggagtacagtggcatgatcactgcagcctcaacctcctgagctcaagagatcctcccacctcagtctcccaagtagtgagactacagccacaccccaccatacctggctagtgtttgtatattttgtagacatggggtttcgccatgttgcctgggctggtcttgaattcctgggcttatgcttaattcctcccacctcggccttccaaagtactgggattacaggcatgagccactgtgcccagccagagctcatgctcttaacctcaacactcaattgtatttccatcacaaaatgtgctgctgtttggagttaagaaaccagctgctgcttattgttccatttactaacctaaataagagtcatggctactagaatatctttcttttccattttgaaacaacagtgatagaaaggagataaatctttgtttgaccacttatttatattaacttctgtaacatactgtcaatctcttatgaccttagacagatggataccaagcaactatccaattactgaaaacatccgagccatatacttgaccttagaaaaactcattcagtctgaagaaacccaggtgaatggaattgtaattcttgcagactacaaaggagtgagtttatcaaaagcatctcactttggcccttttatagccaaaaaggtgattggcatcctccaggtaagacccgtatgtgtcctgcctgtttcgtggtggctctggctttccccagggcctgtccatttactgtgggtctcacatgatacacaaactgcacatcccacacctgcaatctgaaaaacacaaaagcattatgggaagaaatttaaaagtcctatttaccacttgttctcatcagtctctcaagtactctctggagtaggtacttcagtaagacaagagtccaaaaaactagagaatttgcttgttgccttttcttggtctggaaggcagaggaagaattctcataacaaacaaaactggctgggcgcggtggctcacgcctgtaatccaattctttgggaggccgaggcaggtggatcacttgaggtcaggagtttgagaccagcctggccaacatggtaaaaccccatctctaccaaaaatacgaaaattagctgggcatggtggcaggcacctgtaatcccagctacttgggaggctgaggcaggagaatcatttgaacccaggaggcggaggttgcagtgagctgagatcgcgccattgcactccagcctgggtgagaacagcaaaactctgtctcagaaaacaaacaaacaaaaaacctaagaaattatgcttctgcgtaaggtgctggagcccctcctgccctctgtggacctgagggatatggtgttctgttgggctgtattttggtcagatgcttcacacctcatgttctgtgtttcagaacatgagtcactggggactgtggtgctccctccatatctgcaccgtgtttaacagcttgcacagtgcttttacagtcatcagggcctattcagtccctcagcgaatcctctgagataggcaaggcaaaaactatttttcctttttgatagatgggaagatggagacctagagaaaatatagcctgtcacagctgtgacaggttttgattacttgttcattctgacccaccacgtggggtgttttcccttgtaaactatggggcaccggtggtatagtagctcttctcactgattccacaaatgtttcagcccctgtggtgcaccaggtttattatttaaataaatcagtgcacatttggacattatcaaacatttggattctggctttgagccaaccctggctttccttcgctggcactccttttgatgcctcctcctgaataccttgtagattcaagtgtcaggatcaagagtgtggatcagtgttagtaccgtaagatcatctggagaggagaaaaaattaagtaagtttgggaaatgctgtatagcatgtccctttcttgtgaatttcactgtaagaatttacatgttaaaggctctgaacaggaatgcagttaaggaaactcacttgattatgcttagtggactacgtttctcaaactcatttgcctgctgtggagccctgttttatataacctctaatagcctgagaaatatactttgggcaacactgatctggaaggtctggtatttgccagatctgtccctgtagactcagactgttttctgctgtaagagcagcagctcttcatatgtttgcctctcttcttttttttttgagatggagtccaggctgtcatccaggctggagtacagtgacacgattttggctcactgcaacctccacctccagggttcaagcagttctccagcctcagcctctccaagtagctgggattatagacacgtgccaccatgcccagctaatttttgtatttttagtggagatgggatttcaccatgttggccaggctggtctcgaactcctgacctcaagtgatccgcccacctcggcctcccaaactgctgggattacaggcatgagccactacacccagcctctgtttgcctctcttctaacccagttttgggtcccaggaaagactttccctgaggtccgtcttcctagttaggccccacgtggactgtcattgaggaggccataaggatcagatcagactgatgttggggctgaaagtgaagatttaacttgggggaggaaggtgtggaaagattctccagatgttctaaacccctttgcctttcccacacaggatggtttccccattcggataaaagcagtccatgtggtgaatgaacctcgaatatttaaaggcatttttgccatcataaaaccatttctaaaggagaaaatagcaaacagagtaagtgatgatcctattgacttcagatttttcttttcctctgttgatttatttgtgacatctggtacttgtttattatttttgccctggaacaactaatttggaaaagtacagagttacagataaaataaatgaacagtcccttttgtgaggagaagatggaagagtaaatgaacaagaatttaatatttgccagtagagagagcagaaccaggatttttatcataagagcctccctgggcagtatagcaagactcatctctaaaaaaattttttaaattaggtgggtgtgcctggggcacagtggctcacgcctgtaatcccagcactttgggaggccgaggtggatggatcacttgaggtcaggagttcgagaccagcctggccaacatggtgaaaccccgactctactaaaaatacaaaaaattagccaggcatggtggcacatgcctgtaattgcagctacttgggaggctgagggaggagaatcacttgaatccgggaggcggaggttgcagtgagccaagatcatgccgctgcactccagcttgggcaacagtgagactgtctcaaaaaaaaaaaaaaattaggtgggtgtggtggcacatgtctgtagtctccactactcaggaggctgaggtgggaggactgcttgagctcaggaattcaaggctgccatgggcttgaacaatgggctatggtcttgccactgtgttccagcctgggtaacagagcagaacactgtctctaaaataaattttttttaagttatggtcattagaactgtggggtttaaaaatgctacttaagcctttccatttgcctaatatgttgtcccactgtacagtttgtggagcaattcaaggtttacgagctatgtgagtttttagcttacctcttatttaagaagggataaatagcactttgtcttcctttctgacccagaagagccaattccctcttcagcctttcccagtcccactgattgaaatgggatgggtggtatttttctccttccctaggcctaggaaggtcactgcaaagactgggccctgaattttacttgctttttctttttttgagacggagtctcgctccgtcacccaggctggagtgcagtggtgcgatctcagctcactgcaacccctacctcccgggttcaagcagttctcctgcctcagcctccccagtagctgggattacaggcacgtgccaccacgcacagctaatttttgtatttttagtagagataggcttttaccatgttggccaggctggtctcaaactcctgacctcaggtgatccacccgccttggcctccgaaagtgctgggattacaggcgtgagccaccgcactgggcccttgctttttcaaagtaacatatatagatggaaaatctcaaggaggtaagggagggaacttgaaatccagctccagattcctaggctctttccctgaagattttgattcatcagctcagggatctgtgctttaaaatccccttaggaaattctgatgcacagctagatttgcaaaccactaacttagtggcttccctgactgtatgtgaacccatgtgggtccctaaagattctgtttggaactttcaccaaagcagcctttggacaggtcttttacatctgtgaaatgcgctgatttggggcccacaatgttcttcgtttgttccttcataggttcctttattcagaaatatctattgatcaactctatgtacaagcatgttctagatgaacaaaacagaccaaaacccctgcccctaggaaaattatattctaaagggagccacagtgaattatctagtattagaatgtggtaagtgctacagagaaaaataaagcagagaaaagtatagcgtgtgtgaggtgggaagggttgcagtattcaactgagtggttagagatggcagccttgagaagctgacatttgagcaaagacaagaagtgagagagtgagccatctaggtatctgggaggccagcaaggacacaaccctgacgtgggagcctgtccggcatgctgggagagcagctaggctggcgcagctgggtcaagactggaggggcaggtggtgagaggagcactcagagaagtaatgaggctagattatgatgggcctcagagtctgaggtgggagtgctggaaggctgtacatagaggcacgactgtgatctgagtttcactgaaaagaacttagattgcagagggacaagagtgggagcagggagaccagataggaggccactggaggaatccagggagaagcgatgtggctgctgccattaattgaatagtgtggtggtgaggcggctggatcctggatatattctgaagctccagccaacaggatgtatggtataaggaaaagagaattaaggatactccaggctttctgggctgaaaaagtaagggtagagttgccattaacatttcctttcttcattcaacagatatttatttgagcacctaccatggaggagatttctgcattcctgattaacctaaggacatgtgtgttttcatttcattcccttttagttcttcctccatgggtctgacttgaactctctccacacaaaccttccaagaagcatcctccccaaggagtatgggggcacggctggggagctggacactgccacctggaacgcggtactgctggcttcagaagacgattttgtgaaagagttctgccaacctgttcctgcctgtgacagcatcctgggccagacgctgctgcccgagggcctgacctcagatgcacagtgtgacgactccttgcgagctgtgaagtcacagctgtactcctgctactagcccgtcccccagggtcaccatctttaattcttttccttcttttctttggagaggcacaaggagaatttaagggtccatggattcagtcttgctccttgtaattaaactgcaggatggaggaacagcctgagatatgagcatgagcccattttggggtaagcctttggttactttaattactccatggaagacatggaaaatgtccccactgattcttaaacatttggaatcccagtctgcaactattaatctggaggctatatctattttgttttgctttttggttggggggtggtgatctggttcttacacatcttggaagcaagaacaatcaggaccaaagtcactttgatcccacttttccaggagaaaaaccacctgtttggccagtgagaactacttgtatgaaataatttggccaaaccttcagtgtgaccaaatgtgagactgggagtttgtgtttttcacaggaaccctaagtatagacctctgctgctcatcaggaaacttactggagatgaaggccccagctgttgtcaccgggtttggaaagcaccttaactgaatcatgtaagcatcaggacataagcagcactttgtggtcaaatgtggaagccggagacttcaaagcacctctgggacccactggttgaagtttgcaatagaaacttaagttttcccaaatccataaagccttagccctggttctcaatagaatcagggacctagcaggaaatgattttactcaacctaaaatgctggatcccaggcccgtgtagctataagaattctggcctggatcccaggtgtacaactatggacaagatatgggcctctactttctcctctataaaatgaggctggatgaaatgtcagctagggccattttggctgctgaggctctgggatttggtttagttactgaatgttagattttctgcctagaaagataactatctagatacaagtggttggatcctgtttttgtttgtggtacatgtgtctttccaagagagatgtgtcaccaattagccctgcctttaaagaaactattatgtgtattcctgggactcactgacaccaattttctttttatagtgatggttcaattttgaaaagatggcttttgtgaggccaggttaaggtgaccaggatcttgtatgatgaattccttccatccctgagactctggtactatattgtaaacctggctacagtagttaattacttgagattctttaattttggtctctgagctgggcgtggtggttcatgcctgtaatcccagcactttgggaggccaaggtgtgcggatcacaaggtcaggagttcgagacccgcctggccaagatggtgaaaccccatctctactaaaaatacaaaaattagctgggcgtggtggcgggctcctgtagtcccagctactcgggaggctgaggcagaagaatcacgtgaacccaggaggcagaagtggcagtgagccaagatcgcaccactgcactccagcctgggcgacagagcaagactctgcctcaaaaaaaaaaaaaaaaaaaaaaaatttttttttttttggtctctggaaatgaacacaagggcaggttattcctgggtcacttctgggcccccctgccctcccagccccacttgagtttctctctctggtgtgggtgaaccagtcagcctgaatgttctgcatttcagcactttagaacctccctgtgaagattttagccttagcccaaacatcaaattagacggttcacatgatggtttttgacctatttcctttctaatgtattccacatgatcatggtgttaaatagtgaaaagtactgtgttgtgtgtgcaccttctccgtgcatttattagactaaccagtcaagcagacagctcagttagggagaaaacaatactctgaaatttgaaggccaatctgttgttactaagctgtttatctctattgcctttttaaatgtctggataagttgttggtggaaattaagttacttaacctcattaataccaattctagagaaagttcttttcaccatggatagtaaccctggatcctctacggtactggctgagctggaagtgccaaaaagcactcctggctgcttctggttccatctgatgatgatgtgacacacactgctgaaaaggcccaagcagggcaagtgggatggctgaaggagggaaggagggggttcagaacccactggcctggatgggagaactgggtggaggcttccccaagagggaagacagataaacaaaacaaaacaaaaactgggtaaagaggaatgaatcactcagccctgatgtttcaattctacactgcattcctggccagtcgcatttgttttaatgcaggcatggccacagctctcctagagaattatctcaaagaccagaagggacctggagaggcctatttcttaggtttttccagttggacaaggaaggagtggtttcactcagcttctagaaggagttggagcctaagtttatctgcctccgggagctgcttgctttgttttggctccgaagaggtatcagatagttttgacacctcaggaaacttgaaccaagctgtgaaaccaagacctccctgcgtgaaaatcaaggtggtctccttgtggcttcaccaggatgtttgtgtcaggctgtctcagcagggtggggaatgaccagccagggagcacagtgagccttactcagcactggggagcgcactggtgaggcaaacccatgaacctcaagaactgggagtatgttccttcagggagaagttctggcccattgcacaaacacttggaaattaacttttccctaaattcaagatagtgtggtgtcggaaggaaatgggacagtaaattaggagacgcgggctccacctttaccttactacgtggcctttgatgagctggcttaacatccctgagtgattccatgatagagatctatactccaaactttattcctggtatctagttggcttcactgccacagacactgtactctctctttttagaagtttttttccttttttttccccctcaattggcttatttagtaaatttaggtctgaatgaattggtacctaaaagcttccaaatctatacatttcagaatatgggaattttcttcctcttcttcccccatatcccaacatggaattctggaaaactgtgcctcttcccctgttctgccttcatgggggagagactggatgaaatctacaaaaacagccaaaagtgccaccctggcttcatgtcttgaatttctaacttgctcttggcaaaggtcgctttattttttaatttttttccttgcattttcttttttattctattgctgctgcaaaaattaaggcaaaagtagctttcgatctttcatatttcatcctggtttcacaaggagtcacttatcttaggaggtctgtaagtcaggttacaaggccgggagcggtggctcacacctgtaatcccaacactttgagcggctgaggtgggtgtatcacctgaagtccggagtttgagaccagcctggccaacatggtgaaaccccgtctctactaaaaatacaaaaaattggctgggcatggtggtgggtgcctgtaatcccagctacttgggaagctgaagcaggagaatcacttaaacccaggtggcggaggttgcagtgagccgacatcgcgccattgcactccagcctgggtgacgagtgaaactccatctcaaaaataaaaattgaaaaatcaggttacaaaacaccatttttcccgaaataagacaataagaggcttttctctgaattcctttatattgagcctttcagaattctccctgggtgggcaatttctttaaatagtatttgaccctcagatcaatcctgggaatttttttcatttgggtagcaaaagctagagtattgctgtggcgattataatacttttaaaaagttttaccattttaaagttgccaacatttaattaaggttttcctttgaagcctcctttaatttagggagtaaaatgttagctaaaccaattatatactatatactatacactgtatctcctgtggccatgagaggtgtggctataccgaacagaaacatgcctactgttcaggaaagatgtcagttctggtaacacctctctgtattgggatctgttaattttgtaaatctaaattcttctgctcttggccaggtgcagtagttcatgccctgtaatcctagaactttgggaggctgaagggggggcggatcatttgaggtcaggagtttgagaccagcctggccaacatggtgaaaccccatctctactaaaaagtacaaaaattagctgggtgtggtggtgcgtgcctgtaatcccaactacttgggaggctgaggcaggagaatcgcttgaacctgggaggcagcggttgcagtaagccaagactatgccactgcactcccgcctgggtgacaaagcaatattctgtgtcaaataaataaattcattcttctgctctcctgacttagagaaatggtttgcttaaaatgctagtaacaaacatcacagtcaacaggagcttgcttcatgcgaaggatcaatgtgatttgtggatggagatgatagtgatgaaattcctgtttcatggggctgtttttcttttcatctcactgggcagcaggtttagtgaggcagtgagatgctgctgctgtggattcttgtagctatgcctcggcttcttggcatatcaggtaggaacctgttacaagtgaaatacttgaaacctctctgaccaagagcctctgatggagtgggaggtgagctaattctctgaccagcttggggcactgtttcagccactggtcacattccttgcttcaaactgaaattcagtttggctttgagtatagggatacatggtggattcatgtacttcagtgtttgttttgaccaaagtttatttttctagtgcattttctaagtcaaagtggtgaaaatatgtaataattttagtatgcatgactcagtctgaaacaataaaaatctctgaaaaatgtgcatggggttcttttgtgatgatgacagtttggataaaggttccaaggttcattattcacagcccgggtagaccacctcctctgcaggtgagggagggaggggcactgtgataggacagtgcattctgtagatgcgctggctgcctctgaagatcatacacaattagactgctgcagtatggagaggagaatgcagctagctacacagagcagtagaggtgatatgcaaatttttacattcttgaggcccagctatacttcttggactggccttgagtctttccagtgatagccagcgatttcctcaatgtgcgcatgtgggctgggcacacatgtgttaaggacactcataaataatgtattttaaccttcagctacccttaatgaagctgcattactgttcctgttggcaaaatgtagcttgcccagtgacacacaactagccaaatactaaggatgggattcaaacccaggaagtatgacaagcccactgttttctcctgatggctggagacaaataacgagtccccagatagaagagagagagaaggcaggactctttcatagagtaagaaagaaccagaaattgactttttaactggcttcttgaaaatacaagcagtggttgttaacctctctgaaacccaagttgtaacaacattttattccagaagtaagcccagactccttgaggggtaactggagcacggcttgcccaactatggtcccaggcctgctaagctgtttctatgtcccctgtttatttggtactctgtgccccagagtagacaaaaactaggtccccatggtagatctggtgacttgatgagtcagttgagaaatactctaacacaggaggtacacttttgatgatgcaacaggttaagtacttatattgcagcataaccaccccttcaggtcagcctttcctgaggaaattgtggaacttaagttcagtctgtttctcacatatagaaaaatgaagctaactgttaaaatccttttctctcacagcagtcttatgaggcccttttccatgagtcagtattttcttgatgccccctgccccctccttacacagtactggtttggtacccatacactcaatggcaataaagtttcacattatcgcatttaaagggtaagtaataagaccctttagggtaccactcttctggggaaaacgtttttaacctaatattcatgctttttcctgagtaggtgccagccactagggatagctgacctagtaaaagacatgagtcacttgccttcaggtgactactaacttgtctttgtcagtgatgggtagaggagcaaacactctgtgcctgagagtagacaaaaactaggttcccatggtagatctggtgagttggtgatgagtcattagtgagccagatgactcccctacatgtctctaataaatcctgtctcttatattcttatggcccaagagacactgaggtctaattgaaaaaagaactcttaagccaagccctgggtttctctgtttcacctcttactgagtaaccataggcaagtcacgaacttctctaagcctcaaactgatacgtaaaaggaaggagggagggaaataatcaccaccttacaggcatgtggatactgtctgtttaatgcttggtacacctacccatctatgtggtttctattattcttcttcacctgagaacataggcatggtgtggcttgagtcatccagcagtaattaggacatcactgagttgggtgcctaggtaacaggacggacagaccaacacaacaggagtaaagagatgaacagcagcttccattaataagcataagcctactatctgttatcaatctgcacagatcaaatgcacaactcattatgtgaatactcactttagcctgaatgtgtaaaaacagccaggtgcagtggctcccgcctgtaatcccaacactttgggaggctgaggcaggtggatcacctgaggccaggagttcgggaccagcctggccaacatggtgaaatcccatctctactaaaaacacaaaaattagccaggtgtggtggcgcgcacctatagtcccagctactcaggagactgaggcaggagaattgcttgaacatgggaggtggaggttgcagtgagccaagatggcaccactgcactccagcctgggcaacagagcaaaactctgtctaaaaaaagaaaaaagaaccagttacagatttctttgttccttctccattcctcacttggctagccaaaaagaaaaagaacaaaacctctatactgagaaccaggtccatggctactctttggcaggcagtttctttgattaccaagagaaagttttacttcccaaccagataacccgcaagaccaacctagaaaataaaggagtccagcatggacctagaagctttctcccggctttaacgaggtaaaagtggcagccactgctattgcctttgatgagttcctagagcatgtccctgatctgaaagccagggccccaacccgcattccccaaggctaggcaagccctttcatagtgatgaaacataaaggtactcatctggaatgaaaggccaccctgagatctgatgactcaaaatactcccctgctttaaatgatgatcctggccttattcagaatgctgtcttactcatgcttgtatataattcagcattcacatgtataattcacttgagtcttgattagactactggttttcctactaagaggcagacttcactacttcttaaggtaggaccaagcaaagcagggacactgcctcccgacttttaaagagcatttgttacttcaaattaatatcagttatcatcatgagaaaaaaataaaaactttattggactttgttacatttattttacagtttagtattgtttgtattttgaattacattaaggcggaggatggggcactgtaatgtttttgaagtttaggacctttaaagctcttaagctgactccgctactgtaaagaaaagcagggtatctgcttcacactggcaaaataaggggctacatttccccatctgaccctcaaatcccttgaaacgctataccctgacataaaccactggtttaaaagacaatgattccaataatttatatcaagtcctgcttccctaccccacacctccaccctaactgagcctgtcccctctgtgttcctctgtctaattctgtaacaaaatctgaaatccagcctccatcagattctggctagatatctctgacctttgaatattgtcttattttagcccataatgagatcagcagctactgtcagtgctatgtcagtgctaaaaatgggttacactttgcaaaataactttattctttaacaatcttgtacactaggcaccaacactgaggctcagctgcctgtggtcataaatcaaatagtacgtactcaacaaataatagctgacaagtttgatagccagaaaacggcaaagctgggatgcaaacccaagcagtctgactcccaagcctcttaaccattcttaagagaccacctacctccattcttcttcgaacacatgtttttcctgtttgccacctgaatacgtggaaccaccatccacccagctggttaaaccagaatcactcagaaatctacctctccttcatattattcataactgccagtgttaaaattctaattgctggccaggcacggtggctcatgccagtaatcctagaactttgggaggccgcggcaggtggatcacgaggtcaggagatcgagaccatcctggctaacatggtgaaaccctgtctctactaaaaatacaaaaaaaattagccaggcgtggtggtgggtgcctgtagtcccagctactagggaggctgaggcgggagaatggcgtgaacccgggaggcggagcctgcagtgagcggagatcgcaccattgcactccagcctgggcgacagagcaagactccgtctcaaaaaaaaaaattaaaattgaaaaaaaaaaattctaattgctaagtagccctcacctgtcaatttctccccgtccctacgattccacttctctatttcacatctcatatggactgcacctggtctcatctctctaaatccattctctatatatcagcccaagtgactgaagataaaatttgttcatgacactatgaatatgttttcagccaccctcaacataaggtccaaactctttactgaggttgataaagccctttaaaattcagtccctgactacatttccccattccagctttactgaactttttttccccatcttcctgcctttaacatgcagttttatctactccagcaatgtcgtctcattttcccatctctctcttagctaacttctaagagttcttggcttaaatatcattttctccagaaagcctaccattacaccaaatacctctcctttgagttctctccaattcctaaaccacagcactaattcacattataaccacctgtcagctcatttgctctcttctctaagctattaaagtccaagacggcagagcctctatcatgtttaacactgtaccccaaaacctacagggtctagtacagaatagacagtaaatctttgttgaaagaactcttttattctacctttttgcacaccacctctcatgaaaatggttcttgacaatgccttccgtctctcatctaccaagtgtcttacctagagaaggtatttaggacttttgaataaattcaagactttgctcactagtcagaccgtaatttttagaaggaataggagcatcctgactagaagcgtgataaaacctggctatccagaaaataaagaatggctgctaactataaaagctgttggaagaaagggccttaaaatcttaaaagtctttgtattttaaccaaataccttcatagtgcaaatatgataaattcacatgcattttacttttacatactcataacaagatagtaacacagactaaagctgcagtgttttcccaagtgaatcttcattttaaccaaactcacaaagcatttatggaaattaatacatctggcaaagcaccagacttgaatcaagcagtctcaatgctacagtgtaaaaaaagtaaattaaaaaactcaagatgtagaagcagtagccatatcagcaaccattcttctagggaagggacccacatatacgatccttccccaagaactttgatgctaccccgctgaagagtttaagcacaaaacacagtgcttgtatcatataagtaaggactttcatagaggaaaactgtaatataaatgcatttttttttttttgcttttaaaggatactgcaatataaatatattaagcatggcctcaaatatccaacattttcctatcttacattttaaaccaaagttaaaagaacctacaggctttataaagaactctcttcacagcacagctgtagttcactttaaacaaaaaatgttccctttgtgctatatccttagaagtaaacataatatacagataaatgagaagtttcgattctgcatcaagcattattcaatctcaccttctgatataaacctgcatacagtcaaacttgcaaagcattcacttaatattttagttgaaacaaacttaaaaggtatatgggttttcggtgaaggagacctttgtgagttccagtggtgtccttggcactcagaggttcagctgaagtcccgactggtgaggacaagtggagccacaagggtccagacgtaaagcaggaggcagacccagctggagctgatcttgacccacacagctggccacttgctggtcatgctctgaaactttgcatcagggctaagaaaacaagagagagtcaggtagaaaagcctggtctacctgacttctatcagcctcctgcagccccccagccaaggccaagaaattctccagtgaaacttggctggcactaccccccagtagggttgaaggggaccagaggaagctgctatttttagttcttatgaccaagaactaaacagctcattgactctgcctctcaaatgacttttcttcttgccagcatgaaagaccctatcagggcaaagttctttaaatgttcctagttactggcaaaggtctagattgagatagcctccctgaaactttccttccttagtacattattacgggaaccagaatgctctgacatggccatctctatacacagaaaattagtgaacaaagatgggtcagattgctttatgtcatgattttctctctcaattaactcaactctgtaagagctcccaatgatttgcattgcaaagaattccaatgggttttaaatgctagaggggataaagtcaagagtatttaacccaacttcattatatgggtaagagcaagggttctgaggtcaggacaatggatgagattttataggccatccaagggttttatggtcttctgtctgttttgtctgtgtctcctacctgtaccagctggtcagggtcatcatgatgtacaaggaagccaagcagagcatgaggtggaataaggagtagctatactgcactccctctttctcgttgtccacagcccgccgaggctgtccatcttcttcatcactggcaccactggtagttgtatcaccaaggatgacgctgtcactccctgacagggtcagcttgtctacttggctattagtggaagtgcggatgctggaaagtgatcccaaggaagacaaatcagaaaggggccatgacaatgaactgctgccactggcctgtatacaagacacttactgctgagctgttcctactttggagactgaaagctttctgaagatcctgcttaaagttctgaactgctgcctgtcatcataagactgacgtcactgtcatcagttactacttgatgtgatggcttaattgcttaggagtttcataaaacacactatgctctctgtgtctgtttccgtgacttcacaagtgccgcttctatgattggaaggtaccacgtgccaacctccttccaactaacttactcatccttcacttctctgacttgctgtcatgtcctctggaaggccttccctgacatcacccctcactggctaggttacaagacactcctccgacttcccacagcttcctaggcttccttctgccactgcacatatcactcctatcttccttgctattcaaagaatgccttaacagtgaccttagtctatgtaattctagcactacagatgttcactaaaagtttgttaaatgactgaataaaaatgtaaatacaaaaacaggacaaaaattacatgctcgtttcaacagacacagaaaaaacatctcacaaatccaatacctttccatgataaaaacagtcaaagtagaacttcctcaggctgacaaaaggaacaaaaaacccagagctaacatcatacttaacagtgaaagactaaaaactttccccctgagatcaggaacaagacaaggatcctactctcaccatttctatccaacaatgtagtaaaattctagccagagcaaatagaagagataaatggtatccagactagaaaagaagtaaaactatctctatctgtagatgacttcatcttgtttataggaaatcctatggaatacatacacatgcaaactattagaaccaataaataagttcaccaaagttgcaggatacaagatcaatatatagaaatcaggactgggtgtggtggctcacgcctataatcccaactacttgagaggctgaggtgggaggatcgccagaggacaggagctcaagactggccagtgcaacacagcaagactgttcctaaaaagattaaaaattagctgggcatgatggtgtgtgcctgtagtttcagctactcaggaggctgaggtgggaggatcacttgagaccaggagcttgaggctgtagtgagctatgatcacaccactgcattccagcctggatgacagagcaacacttcttctcttcaaaaaaaaaaaaaaaaaaacacaaaaatcaattgtatttctttttgagatgaggtctcactctgtcacccaggtggactgtagtagtacaatcacagctcactgcagacttgacctcctgggctcaattggtcctcccacctccccaagtagctgggactacagattgcaccaccacacctggctaatttttatagagacgggctcttactatcttgctctgactggtctcaaactcctggatgcaagcgatcctcccacctcagcctcctaacgtgtgggaaatacaggcatgagccaccatgcctcgtcaccaatcatatctctatacactagcaataaacaacccaaaagttaagctaagaaaacatacattcatttataataccatcgaaaagaataaaatacttagaattgtatttagaataaaacacttaaaaacaaaataagtttaagatttgtatactaataactaactataaaccactgaaagaaattaaagacctaaataaatggtttaagtaaagaagacttcagtaaggtatcttcatggtcacagactggaagccttaatattgctgagatgacaatactccccaatttggtctatacagattcaactcaatccctataaaaatcccagctacatatttttttgcagaaattgacaagctgatcctgaaattcacatgggaatgcaaaggacccataactgccaaaacaattttgaaaaagaacaaatttggaggactcatacttcctaatttcaaaacttactacaggctgggcatggtggctcacacctgtaatcccagcactttgggaggctgagaaaggaggatcacctgaggtcaggagttcgagaccagcctagccaacatggtgaaacactgtctctactaaaaatacaaaaattagccaggcatagtggcaggtgcctgtaatctcagctacttgggagcctgaggcagaagaactgcttgaacccaggaggtggagattgcagtgagctgagatcctgccactgcactccagcctaggtgacagagcaagacactgtctcaaaaaaatatatatgtacacagctctgtaactgaagcaagtaaagaacttttcattaaagagagtgaagtttttaaatttctcatgctgctttttgaaagcaaaacagcttcttcactttattatcaacctccatgaaaatcttgttctaagtaccttttaacttacctagaatacaagaggcagagaacaaagacaaacagtccaataaaattatctgaatccagtaaagacccactctttgatggtggagtaggggtagggaccacagcagttgaatttccaggagccagggttggtgcagttatgcgtgtaataaagctcatcaggttgggattgcaggaacgatctgaaaatgagaaaatttgtattatccttggttacagctcatcttgttccaagaaagaacttgaggagttccctacatatcattcagtcatgatgtgaaacatgggaatgctttacttaaaaaatctgaaacttagcagtcagtagtaacacgtttggtcacaatcaatgacagaattaggaaaaaaaaagaaaacaacaacagaatctgtcaaatttcataaacatcattattgattttattggttttgtagtttgacaaatctttttaattctttaagtgtcaaggttttaagcacagaagtttatctctattttggtttttacatagttacttaagaacaaaatataagttatcattggtggaaggggggtctgcattgttttcctttaaaagaagcccatagaatatcctactgagaaacaatcctataataactacaaaaggagatttcctacagctgtttcttctacagcctgtgacatcaaactaaaattcagtcacaacaaagggccaaagcccttgaccacagctcttaactagtttgactcagcctaggttaggtaaagcctagaccatctaaaggactctgaccctttagactgtcagttataaatagctatcaatagatgtggggactaaaatgtgaaaggtaaatacctacaaacctacagtgaacactgtacgtttaagttttgtttgcttgtttcacatttgctctagctctagtttttgtaccaactatgtaaaggctgatttcctactttctttttatcaaatgaatgtgttattgacattcccttaccaggttcattggacatggctgaccaggtgaggtacatagtgtagagggtgatgagggaggactgcaagaggccggagcgaggctggtgttcctatggaatcaaaaggaaaacagtggcacagggactgccaagggctgactttccaaaatgcagtgcacttctctggagttaattcaactatcagtaactgagaactttcggattcttcttgagagttgaaaggtgacaagtaaccttctgttcagttagctcgcaaaagaacccagaaagaccaagcaagtactactggttctcaacgcatttcacaatcctagaaattcctgtgcatcacacaaggactttgattttccactcccttggtgtagtgaaaagatctaagatcagctctgcaactaattagtagctgggagaggcctatcacttctttgagacttctgttttctcacttttaaaaggaaaggtgatgtctagatagaattttcatatttcatatctataactccatgaatttttttaaacggtttttttttcttttttttctgagacggagtctcgcttttgtcaccccggctggagtgcagtggtgcgatctcagctcactgcaacctcctcctgggttcaaatttctccttgcctcagcctcctgagtagctgggattacagtgcccgccaccacacccggctaatttttgtacttttagtagagatggggtttcgtcatgttggccaagctggtcttgaactcctgacctcaggtgatctgcccgccttggcctcccaaagtgctgggattacaggcatgagccatcacgccaagctggagtttcgctcttattgcccaggctggagtgcaatggcgcaatctcagctcactgctacctccgcctccagggttcaggctattctcctgcccctcagcctgccaagtagctgggattacaggtgtgcgcccccacgcctagctaattttgtatttttagtagagatgacgtttcaccatgttggtcaggctggtcttgaactcctgacctcaagtgatccacccgccttggcctcccaaagtgctgggattacaggcgttaagccaccacacccagcctaaactatggtatttagaactcaagagcatgagttttgttttgaaatattaaaatcaattatttttcagtttaattcccctaaaatatcttggctaatgactcataagaatcattcccagccacatgcggtggctcacaactgtaaaaccagcactttgggaggctgagatgggtggatcacctgaggtcaggagttcgagaccagccttgccaacatggtgaaaccccgtctcaactaaaaatacaaaaattagccgggcatggtggcaggcgcctggccaaggctggagaatcactggaacccaggaggtggaggttgtagtgagctgagattgcaccatcgcactccagcctaggggacaagagtgagactttgtctcaaaaaaaaaaaaaaaaaaagactcattcccggccaggcgtggtggctcacgcctgtaatcccagcaccttgggaggccgaggcgggtggatcacgaggtcaagagttcagcctggccaagatggtgaaaccctatctctaccaaaaatacaaaaactggccaggcccggtggtggctgcctgtgatcccagctactcgggaggctgaggcagagaactgcttgaacccaggaggcagaggttgcagtgagccgagattgtgccactgcactccagcctggttgacagagcgagactccatctcaaaaaaaaaaaaaaaaaaaaaaaaaagcactataaattttcaagttacctgggtttttttttaatgatagtgaaattcatttaattatgatataggcatgaaatagaattatgaagactttataatatggaaaaatgttcaagtggataaacttagacataaattcataagaaagggtacctagattttaagcttagaattaaaaacctttcacaggagaaagaagtagtaaacaatcatacctgaatttttgggtggatcgatataatagaagccacaacgcaaaggatcaggttaatactgatgaagaacttgttttctgtgcagccatctggtttggtgtaatatgtatagagcagcccgacacagatgattgacaggatataaaaggcgcttgtgaaagacagtaaagctggagaaagggaaaccaatatgaatgaccacaactataataaactaataatgaaggccaattttcttccactccatataaaaatgaggagacattatgtcacttttctggggtaatttacagtaaaattacagaggtctcaaggttaaagtatcaagattgtattcaattggcttgatgttaaattccaaaatccaccaagcaactgaattcacttcctgaattacctgatttgatttcatgggttgattaccagacatttgatcattccagctagagtttactgctacctatatgttaattaatgtgtattgtgagcttttcttaggaacctaaatgattcctttaccctcaaaatgacccagttcacagcaagctccatgccaggatggtgttagaggaaaacagaatacacacactggtatctttttatgacagttttttcctctgcagccattggctatctaaatccatttcccatcacaaacaataagactgtccctgaactggaaaagtggctcatttgctattttttaatatctaaagtaatggtcttttccattcacactaaaaatcaacaattagctgtgttggctgaacatggtggctcatgcctgtaatcccagcactttgggaggccaaggtggctggattgcttgagcctgagttccagaccagcccaggcaacatggccaaaccctgtctctacaaaaaatacaaaaatcagccaggcatggtggcataaggctgtagccccagctacttgggaagctgaggcagggggattgcttgagcccaagacatagaggttgcagtgagccgagatggtgccactgcactccagcctggacaacagaacaaaaccccatctcaaacaacaaacaaaacaattagctgtgtagctctgaaaattagaaaacatgaaacagcacatacagtacactcagaccaactgcaagaatgatgagctcagctaacttgtattcaagtcaaagcccagattaagaaaactagtttctacttatctcaatgaattttgcatgtctaaaattaaatgatgtacattaagttactagcacacttaatgttttcacctctgaatatacaagatttttctacacttagttactgtaaagtatgaccaatttgcaactcaataaattcttctagagttgtatgatccaaaatgaattaaagaaaataacagccgggtgtggtggctcacgcctgcaatcctaacactttgggagggcaaggcaggtggatcgattgagtccaggagttccggcaacatggcaaaaccctgtctctacaaaaaacacaaaaattagccggtcgtggtggtgtaggcgtggtagtgtgggtgtggtggtgtgcacctgtagtcccagctacttgggaggctgaggtggatagcttgagccaggaaggcagaggttgcagtgagccatgattgtgccactgtactccagcctgggtgagagagtgagacccaatctcaaaaaaaaagaaaaaaaatagataaaaataaaattgtcattacaaacaatttaaatgaccaacactagggtaaaggttaaataaattatggtatactccgctatggaatgccatggaattgtatggaatggaataccatgcagcttacagtaaactccatgccaggagcttgaatgcaggttaaatgagtaagacatacctacactcactggtaaggaaggatattcatcatgtaggaagtgaaaagagcaagtcatggaacaacatacagtacaatcctgtttacatttaaatacaaaagcaaggtgaatgcataaatacataaaggttcacaagagtggctacatctggaaaggaaaatgggttgcagataggtggagatttgcatgttttagtctttataaagttctatcatttgtctttatggtaaacatagtatttttaaaaacatgtaaatattttaaaaaactaaatcaaatgaaaataaaactgcgcaattcaatagtatgtactgaaagcattttaaaatattcatacactttgactcttctatttctgggaatctgtcctaaggaaataatcagaaatgtgtgcaaatgtatattatgaagtagtaagtgctctaacatagccaaaatatattcgcaagctactgttaaatcccattatcactctagaaattgtaagtgcccctttcccaccagaaagtttttcatagcaggtatggggcccctctctgaataaggccataaggactactcactcctatctgcctaaagtaggtgggcagctgtcccatatgttgaacccatctgagtttcctctccatggaaacaaggttatcaaaaccagaactaagtcactaaatataactgtttttccttatctaaacacatgtaattaaattatgactctcaaaatacataaattgggaaaatcgaacaatttatattatctgtgctactttcttccagtgatgcatataattcagagccaaattctggaaattgtggatttttttccttttatttaatgttattattatttttagagacagggtcttgctctgtcacccaggctgcagtacagtggcatgatgatagcttactgcagccttgaactcctggattccagagattctcctgccttagcgtgctgagtagctaggactataggtatatgccaccatgcctggcaaattttttttttctaatgtaaagatggagtctcaatatgctgcctagactggtcttgaactcctggattcaagccattctcccaccttggacttctgtccctgaggactatagctgctgggactataatgatgatttttattgtacaccgtgcttaatgtagcagtatggctaacataggtgagtagagatacctaccagcataccacaaccttgggtttccttcttccattcgatttacccatgattcattccaagaatgagcaaaatctaccagcagcaccagctgaatgaggatgaagagggcggcccctatcatgccaacaacaaaccagactacaagaaccaagagaacaaagttattctctaccatagagtaacatttcagaagatccaacattctgaacggatttcaattaaaacaagacagaggtggtaaagacattctgtctccagcagtacagcaagattccaaactcaacggcattcttaaaagctttctactgggtttcagaccttttaaaatatgttttagcttgtgccaagggaagcctgggacctgagttccaaatgatactataagtcttttcttttaaatcacagtagaaatctaaagatgtcacctgatgccatgcttaggaagtaggttaagacagagataggggagcacaagagttgtaagtccttattttgacaggctctctgattagctttgtattccatcaagtgagaacacaaactattaagatattgccaaaagattaacatatggttccagaaaatctgagaggtgcagtgaatgcctcctgacctaaatccacatattaataatgagttgcagccgggcgtggtggctcacacctgtaatcccagcacttcaggaggctgaggcaggtggatcatgaggtcaagagttcaagaccagcctggccaagatggtgaaaccccgtctctgcctaaaatacaaaaattagctgggcgtggtggtgggcgcctgtaatcccagctactcgggagactgacgcagagaactgcttgaacccaggaggtggaggttgcagtgagctgagatcgtgccacggcactccagcctgggagacagagtgagactgtctaaaatatatatatatatatagtgagttgcaggtactaagtcatattaatcggataccatctcatttacttgtcagttctacaaaaacagtaattaaaaggtagttttgttttgttttgttttttgagacagagtcttgatctgtcgcccaggctggagtgcagtggcacgatcttggcacactgcaacctctgcctcccaggttcaggcaattttgctgcctcagccttctgagtacctggaatcacaggcgtgcaccaccacgcctggctaatttttgtatttttagtagagacagggcttcaccatattggccaggttggtctcaaactcctgacctcaggtgatccgcccgtcttggcctcccaaagtgctgagcttacaggtgtgagccactgcacccggcctaaaatgtagctttaactcaatcatctatagagtttatatagtttaaaattaaccccctcaatggtgaaccctacctgagctgaaatagcccccagggatgtagaaagagccaaccatgattccaataagggcagcaattttgaagaaccaaaacctattaaaatataaaaatgcatttatgaaatgctaagtttcacccttatactgagaaaaattcatttctgaaatgcaaaaataataacttaatagcttttttcccaacatgattgtctggactattttcttcatttgactattcatttaataggctaattcatttaatatttcacacaattaaaggacaacattagcctagaagataaatcactcacatttattaccagagaaaactgaaaatttagagtctccctacttttagcacttaaaggtaggcatttttctagcattctgggagttctaaaataacagtgttaggtacacacacagccattaactgttaaggtctggatgaaaagtaatcacaaatatttacaacacagggcacagataccttgcccacaatgacacagctcatcactggcacctgattttcagttcatgatctttaatgactgccttgtatggcagagtggaaagaaccaggctttggagctggacagatctaagtttcaatcttagctccaacctccaactggttaacaggtctcagacaatttattaacctctctgcagttcagttactacatctgtaaaaaggggattataatacacatcaagtttataaaacgccattcagtctttgagaattagaaatacggctgggcacagtggctcacgcctgtaagcccagcacttcaggaggcaaaggcgggcggaccacctgaggtcacgagttctagaccagcctggccaacacggtgaaaccccatctctactaaaaatacaaaaattagccaggcatggtggcaggtgcctataatgccagctactagggaggctgaggcaggagaatcacttgaacccgggagggggaggttgcagtgagccgagatcacgccattacactccagcctgggtgacaagagtgaaactccatctccaaaaacaaaacaaaaaaaaaaaaaaaaaaaggagagaattagaaacataggtaaaaggtggtcaggagtcagaagcaatagaatatgtaaatcagtagcacatatatattcactgacttttgtacactgtttaaatttatcaggtacatgtttatctttaaacaacagaaagaaaaaagtgtgtgtgtacgtagtatctagcatagtgcttcaactatttaacaggtgttcaataaaaatctaagaacatgaagcaaaggaatttaatagaagaaaataaaaagacaagaccccctatcccctccatgttacagcaatctaactgaaaatgacattaaaacaatttcacatgcataatagatcagaaatgcatctgagccactcatttacatattccattgatttcatcagaatggctatattaactgctgaagggaaggaagagccacaccataatgtaaccagttaatcataaatctaacatacccattgtgtactgccgctcggagatctttacttgtttttactttgaacatgagcagagaaaagacaaagaaaaagatggccatggcaaagctgatccgatacacagctttataaccaaccagcacatcacaatctttatctgcatttatatcagcctcatggattttaaatcccccttcacaaaatccaggaatctggaaaaaagcaatttcaatgttacgagaatatctacatttagacagagactctaacccactgcaggaaagcctggatttagaaaattaactacttcaacaactgcaagactgactatggaatttttctctttgtcttccaattcatttacaatcttgttaccaaacagtataaataacatgcattttaaaaataaaaatgctctctcggctgggcacggtggctcacatctgtaatcccagtattttgggggaccgaggtgggtggatcacgaggtcaggagttcgagaccaccctggccagcatggtgaaaaccctatctctactaaaaatacaaaaaattacccgggcatggtggtgcatgcttataatcccagctactcgggaggctgaggcaggagaattgcttgaaccagggaggcggaggttgcagtgagccaagatcatgtcactgcactccagcctgggcaacagagtgagtcttagtttcaaaaaaatatggtctctcttctttgcccttttaggatgaagaggctgtgtgccactttcctgtgagattttccagctacgactgagtccttccaaaggtgaagaactagtccagtttagatgcttcgacctttaacacataaggaaagaaaatgttttggagccacccttttaatgttttctctcagttgttcgactggagcccagatgttcattctgtatttctggaaaaggactaatgtcctcatatttctgtgttttgaccacacccccatataagtaaaaaatctccaaattacaaccaacttgattaacaacgacgaaataaaactagaattttgcagaatataaaaataaaaataaccaataccttaagggcactgttacttcttaccttcttcaagtaagtttccatctcttttctctgcatgatataggatacgacagtgctcaggaggagaatgaaagcataaatgaggcgagtcaccgtggaattcttactgttaggacagcaactacacagcaaacatgaggcaccgctgcagaggcatggaacctggaatgagcacaccatggtcacctgagaccgccttcagtatactcctttatgacacagatgtcgcagaagagaaagcgaggcaaatcaggctttatagttttaactcagagaatcatggctgggaggaagtggttaaaagtacgggctctggagtaaatattatttctgccgctttttaccccagcaagttacgtactctaaccccatttgaccatttgtaaaatgagctcaataatggaattttcctccctcagactctgctgtattaaatgagcactcaacactacctaaaatgcattaacagttcaataaatgttaattatattctgagagcatcatttgttttaaaatatgagaaaaatataaacctaactccacttgctgcttactgcgaatccaagttaccaaagctgatattacaacataaagcaacatgccgggcgtggtggctcacgcctgtaatcccagcactttgggaggccgaggcgggtggatcacaaggtcaggagatcgagaccatcctggctaacacggtgaaaccctgtctctactaaaaatacagaaaaaattagccgggtgtggtggcggacgcctgtagtcccagctactcaggaggctgaggcaggagaatggcatgaacccaggaggcggagctcacactgagctgagattgcgccactgcactccagcctgggctacagagcgagactccatctcaaaaaaataaaataaaataaaaaaataaagcaacactacatggaaaccctctgacaaataataacagcaagggccatttagctcaattcaagaggaaccaggttcctcagaaagttaaatacagaatgaccatatgacccagaaagtatatacccgaccccaatagctgttttgtttgaaactgctattaaaacaaaagcttgtacacgaatattcacagcaccactatttacaatcaccaaaatgtggaaacaacccactgtccattaattgataagtaaatatggcctaagtaaaaatatggtatatctggctgggtgcggcagctcacacctgtaatcccagcactttgggaggctgaggtgggcaggtcacctgaggtcaggagttcaagaccagcctggccaacatgatgaaatcccatctctactaaaaatacaaaaattatccgggcgtggtggctcatgcctgtggccccaactactcaggaggctgaggcaggagaattgcttgaacccaggaggtggaggttgcattgagctgaaatcatgccactgcactccagcctgggcaacagagtgagacttggtctatctatacaatggcttattcagacataatagatagatacatgatagaacacaggtgaaccctgaaaacatcatgcaaagttatttaaaaagccagacatgaaaggtcacatactgtattagtgcatttatataataaaatatccagaataagtgaatctagagacagaagattaggggttgaagggaagggaaatgggagtgatggtttaatgggtaaaggatttccctttagggcgacgaactagacagatgtgatggcagcaaaacattgtgaatgtactaaatgccactatacgcttttttatttttttttttttgagacagtctcactctgttgcccaggctggagtgcagtggcacaatctcggctcacggcaacctccacctcctgagttcaagcaattcttgtgctttagcctcccaagtagctgggactacaggtgtgcaatgccacccccagctgatttttttttgtattttttagtagagacagggttttgtcatgttgcccaggctggtcttgaattcctgagctcaggcaatccacccacactggccaccgaaagtgctggattacaggcgtgagatactgcacccggcccactaaacattttgaaatggttaattttatgtcaactttacctccttttttttaaagagtaacctagggccaggcgtggtggctcacgcctgtaatcccagcactttgggaggccaaggcaggtggaccacaaggtcaggagttcaagaccagcctggccaagatggtgaaaccccatctctactaaaaatacaaaaattagccgggtgcagtggcaggcacctgtaatcccagctactcaggaggctgaggcaggagaactgcttgaacccgggtggccaaggttgcagtgagccaagattgtgccactgcactccagcctgggcgacagactgagactccgtctcaaaaaaaaagagtaacctagatctttagtctgctaaaatctgttagtgaccacactacatgaaagaagatataattttatttctttttttcttttctttctttttttttgagacaggttctcactctgtctcccaggctggagtgcagtaacgccatctcggctcactgcaacctcaccctcctgggatcaagcaattctacctcagcctcccaagtagctgggattacagggattacagacacgtgccaccatgctcagctaatttttgtgtaaagacagggtttcaccatgttggccaggctggtctcgaattcctgacctcaagtgatctgcccgcctccgcctcccaaagggctgggattacatgcatgagccaatgcacccggcctttgttttgttttgttttaaaaagacaaggcgtcactctgttgcccaagctggagtacagttgtgtgatcacagctcactgcagcatcaaactcctgggctcaagcgatcctctggcctcagcctcctgagtacaagcaagcaccaccatgcccagctaagagaggatataatttgagtcattatgcttgattaggaaactgcttgaaattgctctgagggggtgacattatcaagtcatattacaaggacaagctaattcagaattagcagaagtaaacaatggataactctggtcttaaaatatggtcccaggaataatcttcatttttttatagatggtatcttgtgtgcactttatgataattttgtgtggtttgcagcagggtgctaacattctaaaaaagttcagttttctcatctgtaaaaatgagcataataccacctactcgaacagggtgattgagcaaagaatgagatgatgtcaggaatataaagaacctagtataatgcctgacatatttatcaggctcaatatatcgtggtagccattattatttgtaattgcaatagcaatgggaaattgaccagccagtctcagtctccaattcttaactacagtataggccaaacactgcagaggcatgtcctccacaaattcttatgttgaagtcctaatgcccaattcctcaaaatgtatccttacttggtcactgcagatgtagtaagttaagatgaggttatatggagtagagtgagcagctaattcaatataactgtgtccttataaaaaggggaaacttggacaaaggcttacaacacagggagaattccacatgccatgtgaaggcagagatctacaagccaaggaacatcaaagactgccagcaaaccaaaaaaaaaaaaagccaggggagaggcatgatacagattctctctcaccacccttagaaggaaccaaccctgctgacaccttcatcccagacttccagcctctagaattcagagataagaaatcactgggtttaagccactcggtctgtggtactttgttataaagccctggcaaactaataaacttacttacctatagttgtcttaagaatgtaaatatctcgaaggggagactatctttacaacgttatatcttttgtatctttacagagcaggtactcagtaaatatctgtgggacaaatctgtcctactatatgttatgtcatttttctatttcagtaaatgacaactccattcttcctgttgcttgggcccaaaacctggagtcatcccgaatgccttcccttttcccaaaatcctcatccaatctgtcagtacatcagctctacccttaaaatatatccagaatctgaccattttcacagtatccttagctatcacctttgtccaagccacaactatcatctctcatctggattaagcgcaaaagttcccatctcacagctgtagcgacccattcagaagctctgagttggccggcacagtggctcacgcctgtaatcccagcactttgggaagccaaggcaggcagatcacctgaggtcaggagttcaagacccgccaggccaacacagtgaaatcctgtctctactaaaaatgcaaaattagcctcaaaaaaaaaaaaaaaaaaaaaagaagccctgaattgttataaagattattttaagcttttaagctgaagcatctgagcttcaacagatgcagaggaaaaaaaaaagccttctgggagcttctcttatctgactaaaagcagcaacttctgggaaacgaggctgccataaagtccctctccagggcagttttaagatcatgaagaagctggaaagacccaccatacctgcataaacaagtactaccacaaacgtatttcctatttattctcctaaaaaaacttgtctttcctaaagaaacctatttgttcttctcatagaagcctttctcccagcttcctttttcctactaaattagaaagccttggctgggtgcagtggctcacacctgtaatcccagcactttgggaagctgaggtgggcagatcacctgaggtcgggagttcaagaccggcctgaccaacatggagaaaccccatctctactaaaaatacaaaattagccaggcgtggtggcacatgcctgtaatcccagctacttgggaggctgaggcaggagaatcgcttgaacctgggaggtggagattgcagtgagccaagatcccaccattgcactccagcctgggcaacaagagtggaacttgttttctcaaaaacgaaaaaaaaaaaaaaagcctcaagttctaaccgccccctttgagttactattactgagcactcctgtgtgtacatgtcttgcatgcataaactctaaataatctgttttgtcagtttaattcacaagcccccagaaacagaacccaaaaggctggaggaagattcttcccagcctacactgctttacctttacttttctaccatctattctccacacagcaaccagaaaccacctcgttaaaacacaggcccagatcacatcactccttttttcaaactctgtaatagattcccatataacttaagagtaaaagccgggcaagacgcggtggctcacacctgtaatccaagcactctgggaggccggcggatcacgaggtcaggagattgagaccatcctggcgtgagccaccatgcctggccttcaactcaccaggattttctaatgtgatagaagataaaagaaaaattgtacagtaaacgattatttcataaaactttgtctctatatgggtgcatcagatcacagatcaactatgtacaatctttctttaggtcaaggtcagaataattagaaaaccactgctctcaagaaagcccttaaaaatggaacactcttttgatttaggaccaacaaccttaaaatacattctgttcctaagaaatagtggaatgaagccaggcatggtgtcacacacctgtactgggaaggctgaggtgggaggatcacttgaatccaggagttcaaggctgcagtgagctatgactgagccactgcactccagcctgggtgacagagcaaaactctgtccccctccaaaaaaaaaaaagaaaaatagtagaaagagctgaaacagaatccttggtgtaatactgtcaaatatatgtatgtttggttcccatttcctggcatacaatttctaaaatccttggaataaccagcgtctttttgtatgctaatgagatgactggtgactggcagcccctaggtggcttcatgatgggtgagggtcatagtaggaggttgggacttttcagtctcacccctgaccctccaaggaggggctgaaggttaggtcagtaaccaaaagccaatgatttaatgaatgctgactacataatgaagcctgcataaaagctcagaaggacaaagttcagaagaacttttggctgggcatggtggctcacaccccaggagttcgagaccagcctggccaacatggcgaaatcccgtctttattgaaaatacaaaaattagctgggcgtggtggcatacactataatcccagctactccgggaggctgaaacatgagaatcccttggaggttgaagagagccgagatggcgccactgccccagacagagcatggaagctccagacccgttccctctacaccttgtcttacatatcacttcatctgtatctttaaaaatatattaatagtagccataaaaaaagaagaaaatcatgtcctttgcagcaacaaagatgcagctggaggccactatcccaagtgaattaatacagaaacagaaaaccaaatacagcatattctcgcttacaagtgggagctaaacactgggaacacagacacgaagatggcaacaataaacactggagagtccaagagtggggaaggacggtggggggataggggttgaaaaactacctgttggatactgtgttcactgtttgggcaacggaatcattagaaacccaaacctcacgataaggcaatatacccatgtaacaaaactgcatatgtaccctctgaatctaaaattaaaaatacataaatacacaaaataaaatacttttataataaaccagtaaacatgtttccttgagttttgtgaccaaattaatcaaagccaaggagggaggtcacgggaactttgatttataggtggccggtcagaagcacaggtaaaacaacctgaggcttgccattggcacagaaagtgggcacagtcttgtgagactgagccctccacttgtgtgatttgatgctatctccaagtagagagcttcggaattgacttgtagggcaccaagttggcatcccctgcagagctgactgtttgcctgatgtttgggggaaaatccccacacaccacacatcaggtgtcaaaagtgtgttgtgagtacagcaggagaaactgagtgtgctttttctacacacttggtcaattaaatcagctggagaatgaggaatcaaggaatcacgctcctctgaagtgggtaaatgagggaactcagcatattcttttataggccctataattttctctttaaaatgtttacagtttacaaggtgattaaaccttcacttcactgtcacaatcgttctcgaagagaggaatgctggggtgattatcctcggataaatgacttacagcagtcccaaaatattcaggccctggtttccaattttgaataacaatccacaagggcttctttcccttgcacctgaactgcagacaagcctccgctaaaaccccagctttgccacacactctgtagttttggcaaatcccgtgctaggggataaaaatattacttgagccacctagaactaaatgatggcaccttaagaggtgcttcgggaggaaccggagcccctcgctgggagctgtcattccttggtccctctccagctccagaggaacctagtcaggaagcctcgcagggcggagccatccgaattgtaaacaatggcggcctagcctcttccgttccccgaggaacccggagggcgagccgcctaagctggacctgagggtatcgcggatttgcgtctggggccccggagaccctctgtagcccagggcctgctgacatcccgagagcctctggagccaaggcccgtgcagctctggtctcgaggcctttccccgcaaaccgcaggtccggcgaggactcgggaccccgaactcacccagctggcgagggagaagacacccagcacagcccccatggtgacgccagtgatggaggtggccggtcctgaggctgctttctaacacggtggtaactgccagctgaggtgactccccagaaacatgacggtttctcaggccggaaacgcagccttccacagacgcacggatgcgtcacggcgtggccccgcccaccgtccgcgaccggagcggcagaggggggcgcctgtcattggctgagggggaaggtggggctaaaccatcctggggttgcaggaactgtgaaggtgtcattccttacatcatttgtattcattgtgcaaagatctggaagttacagaagtgtacagagaggcacagtacgctcagaatttattctctagttaataggagatctgacaacataaatgcaccgtgccccaatgtaatgaatacgatgaagtagtatgggggaataggctttcaataaaggtgtatttagtgcctcctattgtaaggggaaagtaatttagctgggcagtagtcttggaaggcttctctgaaggatttattttttaatctgcgaactaaaggatgagtccaaattaacctagaaacgatggaaatcgtatcctaaaatgtgggatgcaccccatttgggaaaaatgaatggctctaagggtgcatgaaggacattaagcgatattaaacagcagagtgagaacgtcccatttcaaaccaacaggctagttgtttgaggccagtatggtatttaacatttttctagtatttatctccctttctaacagagtaaagccttcattttccagatctctcaaacaggcaaccatgcctgcagttttaaaatattgttttgttttgaggtgtgtgttagcaataaccttttcatttcttccgagcaatgctgatttcccatttaagcagtgatgtaaatattcctttcaaaatacatgtcaaatttgagagttcacttaaagaagaaaatgaaaacattttttacttacacatataatagtttaggtggaatgtggcaaacaatgatgatgtccggacaacaaggtgtcacacttcaatatcttctcctgtggtgtgttaatcttccctgatagataaaactctctggaaggggattcataattgaattccttctggattgtcagcctttagtctgataagggaaattcatgaaaagcccctctctccatgtgctgttccccaagcaatcatcataccagtgtggcatatttggggatgttatttcctggattccttgaaaatgtattccaaattcatcttttacagaaatggaatgaggctcaaagtttgcccaaggccatgaaaagggctgatgaaagaagaaagagaactactcacatttaataattcctacctctcttttcccagatccctctcctcaccacacatacacaaataccagctcaagtcaagttgcttcaggaccactgaactttccaggtagtccttaacattcttgcttcttcctgtctgagtattgctggtctggacttaagagagctgactgtgataaattttacagatcgaattctaccagaaacatacctgtagtcaaaaagaattaggtttatttagcttgttcagaaagggagaacacatatcagagaaaatataaggtgtcttggtaagaggtgactggggagaacttattttaggatttgggtttatgctgggtaactaaatctaaggagagtttaaggaggaggagaacagttttggattggacacagtcaaggagtagaggcaattcagtgattaggtatcttacaaatttttatccagaaggaagaaggattaaaacaaggctagattagtccttggaaaagtgtgataccctaccttgtcttaacctgaattgactctctcttagctgagggagacagacaaactccattttggctccttcacttgccgctccttacccatcccacttcctcaaggatttaacttgtgcaagctgactcccagcacatcaaagaatgcaattaactgataagatactgtggcaagcgatagctgcagtttccaggaattcacccggttgatagtaccctaagcccctgcatttttgtccggttgatggtacccaaagcccccacatctatcaccttgtgatggatttaaagcccctgcacctggaactatttgttttcctgtaaccatttgtctttttaacttttttgcctgttttacttctgtaagattgcctcagctaggctccccctcccctttctaaaccaaagtataaaagaaaatctagccccttcttcggggccgagagaattttaagcactagccatctctcagttgccggctaataaaggactcctgaattcgtctcagagtgtggcgtttctctataattcgctcggttacaaaaaaagaagcaaaatccactcatttattagtcagaattggaagatgttgagtcctatctgcggtaccagagtggctttgtctgtatcttgatccaactacatggtggtcttgtctgatctttgtttatattctgtgatcactgtttttgttcagttagaaacattaggtctagctgtcagctgaacagtttttcattttcttacctgtaagcatttgtcctcccacatgtaggatccccccatctcttagtgtttctggccctaactggttgagtgtgtcacttctacttggccaaagcgaggacagcagatctttgtgatcatctactccaatttcccgcctcaggcagaaaccccttagcaacatctcttctagggtagggggctcactgccacccaaggcagctcctcccatctttacacatccattgtcaaacctgtcaggcctctgagcccaagctaagccatcataaccccgtgaccttcacatacacatccagatggcctgttcctgccttaactgatgacattccaccacgaaagaagtgaaaatgccctgttcctgccttaactgatgacattaccttgtgaaattccttctcctggctcatcctggctcaaaagctcccccactgagcaccttgtgacccccgcccctgaccatcagagaacaaccctctttgactgtaactttcctttacctacccaaatcctataaaacggccccacccctatctcccttcgctgactctcttttcggactcagcccgcctgcacccaggtgaaataaacagccctgttgctcacacaaagcctgtttggtggtctcttcacacggacgcgagtaaaaaaacctaggttatttccccccatatgttgttgaaaagataacacatgtacttggttataacatactgcataaaggagcacacggtgaaaatgaagtgtccttcccacccttcccccacccccatctcccagatctcctttcagagttcctacaggaatatgcatatgccagcattatggcacttttttttttttttttttttttgagacagagtctcgctctgtcgcccaggctggagtgcagtggcacaatcttggctcactgcaacgtccgcctcctgagttcaagcgattctcctgcctcagcctcctgagtagctaggattacaggtgcccaccaccatgcctggctaatttttttttgtatttatagtagagacagggtttcaccatgttggccaggctcgtcttgaactcctgacctcaggtgatccacccgccgcttttttttcacttaacttattagttcattcgataaatatttaccatgctattactatgtgtcaggcactgttgccagtgataagaaaatagtagagaacaaaacaaagtgcccacccttaaaagaccttatgctgtagggaaaaaagacaagcagcaaacacacacgtatataatataacactcagacactgacaagagctgtgaaaaaagagaaaggagaatacagagttggtgggggtccattattttcttttcttttatttatttatttttttttttttgagacagggtctcactctgtcacccaggctggagtgcagtggcatgatctcacctcgctgcaacctcagcctcttgggttgaagcaatactcatgcttcagcctccccagtagctggaattacaggcacataccaccatgcctggccaatttttgtatttttagtagagacagggtttcgccatgttagccaggctggtcttgaacacctgacctcaagtgatccgcgcacctaggcctcccaaagtgctgggattacaggaacgagccactgcgcccggccctactattttcaagagtagtctgggcaggtcttttagagggcttgacactggagcacagacatgagggaaccgaggaagcaagccataaagatacctggaggaagagcaggagaaaatgccctgagatgaaagcatgctttaaggcaggaaaacagagtctggagtcggggaacaaaaggctgattcacacttcagctatgacaggaaatatcctctccatagggtgtaggccaagtaaatgactttgtaactttacttcatccttttcatttacatagggcgtgtcccaagtagagggtatttaaactcccaaaaattctgtaacaggggcccttgagctcctatgcttgggccccctcccacactgcggagtgaattggtgagatggagtcttgctctgtggcccgggctggagtacactggctcaaactcggctcactgcaacctccacctcccaggttcaagcaattctcctgcctcagcctcctgagtagctaggattacaggtgtgcaccaccatgcccagccactttttgtatttttagtggagacggggtttcaccatgttggccaggctggtctcgaactcctgacctcgtgatccgcgcgcctcggcctcccaaagtgctgggattacaggcgtgaaccaccgcgcccagcccatactttcattttcaataaattccttcattccttcttgctttgtgtgttgtgtccaattctttgttcaagatgccaagaacctggacaccctccaatggtgacagctgagagggaaaatggtgagagatgaggctggacaagtattcagggggcagttcacttccagccttgttgatggtgacaacaactctacatcttattctaaatgtaatggggaaacagttgaaagcttttgagcaggtgagggacatggtcatgcttacttttttttttttaagctggagtttcaaaaaaaagccttcagccaccgcgccaatcatgtttacattttattttatttattgttttgagacggagtctcactctgtcaccaggctggagtgcagtggcgtgatctcggctcactgcaacctcggcctcccaggttcaagcaattctcctgcctcagcctcccgagtagctggactacaggcgcacgccaccacgcccagctaatttttgtatttttagtggagacatggtttcactatgttggccaggatggtcttgtactcttgacctcgtgatccacgtgccttggcctcccaaagtgttgggattacaggcataagccactgcgcccggccgtgtttacctttcaaaaggatcattctggctgctggttggaataaagactggagcagggatgggttagggttgagggttatagtagaagcaatggcgggactagttcggagactgttgccgtatacatagctgaaactgcctttgcaaaattatgacggagacagtgaaaaagatctaacttcatcttcgttctaacctttaacctgtccttgttccttcctgggtgtaggctgaactaactttgggaggaacttagtttatagtttaaaacaaagatgataacagccccttcccaaaacaaaccttcctcttgcctgggtactagactgcctttgtaggactaacaaattagccacaagattagaaattatggcttaggagtcatgcagctggaggctacaagattctgaccctccctgaacttctgctaagatcagcgcttgagatattttccagaccctgaacttgatggatcagctggcaccacacagattgataaagtggctcatctgatcttgtggcccgcacccaggaactcagtgcaagaggacagcttcagcttcccatgatttcatctcctacctgaccaatcagcactccttgctcactggcttccccccacccaccaagttaaccttaaaaactctgatccccagcctggagcggtggctcatgcctgtaatcctggtaccttgggaggctgaggcgggtggatcacttgaggccaggagttctagtccagcctggccaatatggtgaaacccccgtctgtactaaaaaaaatacaaaaaattagccaggcatggtggtgcatgccttgtagtcccagctactctggagactgaggcaggagaatcacttgaactggggaggcagaggctgcagggagtggagattgtgccattgcactccagcctgggcaacagactccgtctcaaaacaaacaaacaaacaaacaaaaaactctgatccccaaatgctcagggaggctgatttgagcaataataaagctccggtctcccacacagccggctctgtgtgaattactctttctctgttgcaactcccctgtcttgataagtcagctctgtctaggtagcaggcgaggtaaaccccctggctggttacacagcttgaagacagctctgtatctaaactgtatctacgtctatatctaccttggtccctcttaattcttgctacggtaatctattttattttatggatgtatcataatttatttcctcagttccctaaggatagactttttttttcgtttgagacagagtctcgctctgtcgtccaggctggggtgcaggggcgtgatctccgctcactgcagcctctgcctctcgggtttaagcaattctcctgcctcagcctcccaagtagctgggactacaggagcgcgctgccacgtctggctaatttttgtatttttagtagagatggtgtttcaccacgttggccaggacggtcttggtctcctgacctcatgatccgcctgcctcggcctcccaaagtgctgggattacaggcgtgagccaccgtggctggcttttttttttttttttgagacagggtgtccctctgtcactcaggctggagtgcaatggcacagtctctgctgacttcaacctccgcctgtcgggctcaagggatcctcccacctcagcctcctgagtagctgggactacatacaggtgcacaccaccacacctggctaattttttaattttttgtagaagtgaggtctcactatgttgcccaggctggtcttgaactcctgggctcaagcaatctgcctgcctcagcctaccaaagtgctggactgcccaaggggttcaccttgcacgctgcctagacagagctgattaatcaagaagggggaattgcgacagagaaagtaattcacacaaagcctgctgtgcgggagcccagagttttgttattactcaaatcatcctcccgaaaactcaaggatcagagtttttaaggataatttggtgggtagggggccaatgaattgggagtgctgattgcttggctgggggatgaaattgcagagagtcgctgggcgcggtggctcatgcctgtaatcccagcactttgggaggccgaggcgggtggatcacgaggtcaggagatggagaccatcctggctaacacggtgaaacctcatctctactaaaaatacaaaaaaactagctgggcgtggtggcgggtgcctgtagtcccagctactcgggaggctgaggcaagagaatggcgtgaccccaggaggtggagcttgcagtgagccaagatcgcgccactgcactccagcctgggtgacagagcgagattccttctcaaaaaaacaaaacaaacaaacaaaaaaaccagaaattgcagagagtcaaagctgttttcttctgctgagtcagttcctggatgagggccacagaactggttggcaggtccagtggggccatctggttgttagaaatgcaaaaacctgaaaagacatctcaaaaggctgatcttaggttcacaatagcgattttacctcaagagtaattgggggccaggcacagtggcttacgtctgtgatcccagcactttgggaagctgaggcaggcagatcacttgaggtcaggagttcaagaccagcctggccaacatggcaaaaccccgtctctactaaaaatacaaaaattagctggcgtggtggcaggtccctgtaatcccagctactgtggaggctgaggcatgataattgcttgaacctgtgaggcagaggttgcaataagccaagattgtgccactgcactccagcctgggtgacagagcaagactctgtctcaaaaaaacaaaacaaaaaaatcttatgacctctagaataagaataatggtgggtactatttagaactccagcccttctcatcttggcttggtggctggtggcctgtggcctttcatttgttttacaagaacagtttagctttctggaaagggctattgtttaaatgatacactaaattccttcccaaggctagtttggcctggcttggcatggtggctcacacctacaatcccagcactttgggaggccgaggcgggaggatcacctgaccaacatggagaaaccctgtctctactaaaaatacaaaaaattagctgggcgtggtggtgcatgcctgtaatcccagctactcaggaggctgaggcaggagaatcacttgaactcaggaggcggacattgtggtgagccaagttggcgccattgcactccagcctgggcaacaagagcgaaactccgtctcaaaaaaaaaaacaaaaaacaaaaaaacaaaaaaaactggtttagcctatacccaggaatgaacaggacactttagaggttagaagcaagatggggtcagttaggtctgatatctcagttatgattttttgcaaaggtggtttcaggatgacaggtgtgagccattgcgcccagcccctgatagatatttagactggtcgcaacccttttgcttttacaaaaatgaattaatgaatatatcctttgtgctcaggtttcagcatatctgcagagttattccaagaagtgtagttgctagacacaaggaaaaataaattattcctcatattgaaattaaatctggtgatctaattctccatcaaagaaaccaatttattcactctttgccacaccaccccttcagagactataaaagagaggaatctgccacccttcccacatcagttttcttgtctttaaatattcccagtcttggcagggagtggtggctcacgcctgtaatcccaccatgctggtaggcccaggcggatggatcagctgaggtcggagttcgagaccagcctggtcaacatggcgaaacctcgtctctactaaaaatacaaaaattagccaggcgtggtggcaccttccggtaatcccagctactcgggaggctgaggcatgagaatcgctcaaacccagggggcagaggttgcagtgaaccgagattgcgccactgcactccagcctgggcgacagagtgagattctgtctcaaaacaaaaacaaaaacaaaataacaaaaacccagtctaccaagccaccacctgaggccctgtctcctcctcgcacggtccccatttgaggttacagagagataaactgaggcacaagcagcacccgcggcccaagacctccccttggcctcactgtccccctttccgtatcttccccgggccaagttccaacccggatccctccttcgcagctcagccctcgactcccacttcgtccctcctctgccccctccgcggctgcggaaggggacgcgaaccgtcctggtcccatccgagccgccgtagcgcgagtgccgcgggagttcggcagcccaggtcgccaaggcaacgggctccgctgcgggttgcgggctgcgggcgctaggctgccccggggaggcgctgcggaccggcggcccaggcacggagaggcggcgagaccgcaggtgagcaggagccgggcggccggttgcggccccaacgctccgggcctggcgtcgacacgtcgcagggggcgaggggctgagccgccggggatcccggggagggaggctgcggcccgatctttgtccctcagccgcgccggggacggcgcccccgacgccctttgaccccgccccgcgttcagggagagtccgttttcggctgtttattatatttgtagccattggtcgacctcattcgaaagtttcttaaaaaaaaaatcccttcttgtttgggggccagaaaataactcaaaactgtgcagaaaatttatttgtgtgtgtgactcttctggggccagagaggattgacttctttgtgcgtcagttttatcgtctgcaaaatgggaatcatggtagcacctgtctgatgacgttattacaaggtaaatttatatttaaaattcgtggaggtaagccctcaatacatgggagcttttattattactactactacaaggaggaccatcactgagcatttattgtgagccacggcccgggctgatagccagggtaaaaaagtgaacgagagacatcgtgtcctgagggaactccacagttttccggaggagacagactcgtaaacaagaattcacagtgattccggttatgattttggacatacaggggggctgtgaatgcacagagaaaacagttaacctggatttctggaggtgaggttagtgtggatgatcagggagagatgccaaaagaaggtgacttccaaaatgagacatgaaggctgtctttatgttggccagaagatgaggctggtggagtgtaccttgctgtgggtagataaagcaggtagagaaagtaggtagagaaaagccttggggagagagtgcagacttcttgggaatctgcaaggatttcaggctagctggagagcagattatgagagttggagggggtctggctagatggtgtttgagagacaagcaggtgctcctcctgaaagactgtaagtgtggaggagtttgggctttgtgttgggggcagtgggaagccatcaaagggttttaagccggaggtgtgtgtctttgatcagaggtatagtttcagaaagatcagttttttgtgtttctctcttggtcttatcattcctcccatctgtttttcactttgcaggcattcatttgtggtgattcatatatatgtgtgtgtgtgacagtgtgtgcgtgtatgtatttattgttgagatgaggtctcactatgttgcccaggctggtctcagattcctgggctcaagtgatcctcctgtctcagcctcccaagcagctgggactgcaggtgcacaccactgcacctggctaattcaaaaaatatttaatgagcatcttcttctatgtgcaaggcactgtgtaggtagtaaggaagcaggtccctgccctcaaggagatcacagattggtggagaaaatattcatcaaacaagtgattataattgtgatgagaattgtgaaagggggcgcatgttaagatcaatctagcatagtttggagattcaggtagagttttgataaaatgtatggagggtgtagtctgagttagctatcgtggggatgttccaaacattttcaaaagtacattcatggagccaaaagcagtccactacaactggaacttaaagatcaatattgaaagagatccatccagagaggttgacaaaaaaaaaaaggctgagattattcagggctactgcattgcatactcttggaagaatgagccatgcacttagtctacactaaaagaaatggctagagaaacaggaacaggagagaaaccagcaaagtatagtaatgaaggccaaagggagaggttggttggcctttgtagatgttgctgagatgtcgagtaatacaagttaaaaattaaaatgtgtccttttgggtaaataaatatggaggtcggttgggacctcattgagcagatttggtgaaatggttggggcggaatctataatatcagcagctttcaaaggttcaatataatatatcagtgggatgagttaagagtgggatgtgagaaagacaaagtgtaggcagctcagagaagtttggctgcgaagggaggtagagagaaggctgaggagcgattggggaataggtgaagtttttttgagcatgagagagattaaatgctgttggcaaagagccagtggagagagagaaaggctgagaagacacaggatatgaaagggagaattgatagtataactttcctgagaaggtgggagtggaggagctccacagtacagatccttcaataggagtctgatgcctgttactttttggagacgtgggaagccaggttattcctgaaaggagtgcaccagtgtaatgcaacaaaaataaataaaggtataagtgtggaaggaaagtcacaattttcattgtcggcagatagcaggcatttattgaactagtattgtgttaagtacttttcatgcaccattcttttttttttttttgggacagggtatcactctgtcgcccatgctggagtgtagtggtgcaatcttggctcactgcagcctctgcctcctgtgctcaagcgatccacctgcctcagccccccaagtagctgggaatacaggtgcgagccaccacactcagctaatttttgtatttttagtagagatgaggttttgccatgttgaccaggctggtctcgaactccagacctcaagtgatccacccgcatcggcctcccaagatgctaggattacaggcatgagccactgcgcccggcctcatgcaccgttcttaatgaataatgtgatgtttacaacaaccctgtgagataggccctctaataattgcaaatttatggataaagaaactgaggtaacatgctcactcagggtcacacagtatttgaatctaggtttacctgaacccagagcttttactcttaaccactacctggatgatataaatctctacctgtgatatgattgtctgctgagaaaattcaagagaattaaactaaaaatacttagatataataaggctaagtgaacagcagttataagatagacaaaaagcaatagctttatgcaaacaaaaatagaaaatgtaattgtaggagaactgacaatagcaacatgaaaaataaatacttagaaataaacttaaaaatacatgtacccagcttagccacacagagtaagagttggctgggcatggggatgggatgacaggatgagtaaggtaaagtagttttcccatgggaacatcagagtattgatactggagaaggggtaggttaaaaaaaaaacaggtgtctatcataagacatcatgagatattgactatcatgtttttataaaattgaaaaattggcctggcacggtggcttacgcctgtaatcccagcactttgggaggccaaggcgggcagattatctgaggtgaggagtttgagactagcctggtcaacatggtgaaaccccatctctgctaaaaatacaaaaattagctgggtgtagtggtgcacgcctgtagtcccagctacttgggaaactgaggcaggagattctcttcaacctgggaggcagaggttgcagtgagctgagattgtaccattgcactccagcctgggtgacaagagcaaaactccatctcaaaaaaaaggacagttaggtgggagctatatatattagaaagatgtttacattatgtggttaggtgtaaaaagcagattacggtacagtatgttactgttttcttaaatgtatacatgtttataataaaaatgtctggaaatactagttctttttaaaaatgttaaatctttaattgtgataaaatttaccatcttaacgatttttaagtttacagttttgtagtattaagtgtattcatgctgtgcaaccaatctgcatgactttttcatcttgcaaaagtgcaaaagccaaactatacctttaataggtttagctccccatttccgcctccccaccagcccttggcagcacccattctacttttgttttctatgtgtttggttactctggatacatcgtgttagtggaatcttgcattatttgtctttctgtgacgggcttatttcactagcatagtgtcctcaaggttcatccttgttgtgtagcatgtgtcagaatttcattctttttgtaaggctgaataatattccattgcatgtttataccgcactttgtttatccattcatcgatggtcactttgagttgcttccatcttttggctattgtgaataatactgcagtgaaacataagtgtactagaaaggtaagctgtttatgagatcatggggaaacttttattctgttcctcattgccctaattttccttttttatgagcatgaattgccttcataatcagaaaaaaaatgaggaagtatcttctttaggaggctggggaaataagggtaaaaaagggcagtggcagcggaaagggaaaggagagggcagatttgagagacatttcagaaggagaatcaacaggacttgaccaacaagaggtaagggagagaggagtggaagatgaagctttcctggcctctggtgggaaggggcatcagtcctggtggggctttgactaggggaggagggaggaaataaggctggagagccacccaagcctttgtttagcagtttggacttctagaaggtggagagaaaccattgaaaggaagtgaaatgacttgatctgatttgcacatagagagatgacactggctctttccaaccattctttaaactgaaggcagatagtgccaggtatccctttgtgttgcttatacttgaacttctgttaatttccttttatttgagatgaacctttagtactgaagtacacatatctattattctaaaagcacctggaatattttaaacaatgttttagtgtgtgtttttttgttttttgtttttttgtgtgtgttttttgagacggagtctcgctctgttgtgcaggctggagtgcaatggcaccatctcagttcactgcagcctccgcctcccaggttcaagcaattctcctgcctcagcctcccaagtagctgggattacaagcacttgccattatgcccggctaatttttgtattattattattttttttgagatggagtttcactcttatcgcccaggctggagtacaatggtacgatcttggctcaccgcaactgccacctcctgggttcaagcgattctcatgcctcagcctcctgagtagctgggattacaggcacgcgccaccacgcccggctaattttgtatttttagtagagacagcattctccatgttggtcaggctggtcttgaactcccaacctcaggtgatccactcgccttggcctcccaaagtgctgtgattacaggtgtgagccactgctcctggcatttttgtatttttatagaaatggggtttcaccatgttggccaggctggtcttgactcctgacctcaagtgatctgcctgcctcggcctcccaaagtgctgggattacaggcgtgagccaccgtgccctgcctgtgttcagttttatctcaataacacagtctcctgtaaatatacttacttttttttttttttgagacagagtctcactctgtccctcaggctggagtgcagtggtgcgattttggctcactgcacccttcgcctttgaggttcaagtgattctcctgcctcagcgtcccaagtagctgggattacaggcacacaccaccacaccggctattttttttttttttttcatttttagtagagacagggtttcaccatattggccaggctggtctcaaactcctgaactcagatgatccacccatcttggcctcccaaagtgctgggattataggtgtgagccactgcacccagccatcctgtaaatatactttctgactttagtaggagaagtatgaataattgggaaaataaatgaaacaaaaataattcaaggtagagtatgtcacaattctgttaaaattttaaaatttaaaatttttcacattttactgaattctgacagcctccttttgagagaaaaaggacaatataaggtatacagtgtcatattaaggaactcttacaaaatgaaaatttggagggtccagatggattcagcccgtcacttagctccactcccacaaacctgtagtctctgtctacttccagagcattacagacagagggagctaactgttgtgctaacatttgtaaatagctctgcagtttagaagagctggatttccaaaagatgtaaatccatgatatcattttagtcctcctaacaattctgtggggtagggattatcattcccattttcaaatgagaaaattgaagatcagaggatgtgacagatccctctcagatactatatctaataagtcctggagtttgaatccaggttttattttcttcttatattttagcattttattatggaaaagtttaaacatacaaaagtagaaaagataataaaagacacctaatatactgagctttagcaattgccaacatatggtcacttttattttatctatactgcctacttccatcccaccttaaattatcataaagcaaatcctagtcatcatatttcatccatgaatactgtacttcaatatacacatctaagagagaaggattttttcctcctcctttcccccctgtagtcacagtttcattattacacctaaggaaataaacagtagtcagtcctaaatattacataatatccatttggtattcagtttcctcaacaattttataaatgtctttctaaaaaaatgtttttttcaagatggagtctcgctatgttgctcatgctgtacttgaactcctaggttcaagtgatcctcctatctcagcctcatcagtatctggaaatacagatgtgtgtcagtgtacctagctttttttttttctttctttttgacacagagcctcactcttttgcccaggctggaatgcagtggcgtgatctccactcactcactgcaacctctgcctcctgggttcaagcaattatcctgcttcagccacctgagaagctgagattacaggcacgtaccaccataccccactaatttttgtatttttagtagagacagggtttcactattttggccgggctggtctcgaactcctgacctcaggtgatctgcccgcccacctcagcctcccaaagtgttgggattactacaggcgtgagccatcatgcccggcctgcccaactttcataaatgtctttttacagttggtctgtgttcactgggatccaaacaaggtgcctgtattagacctgattgatgatctcttaaatcaagcttgtccaatccgcagcctgtgggccaaatgcagcccaggacagctttgaatgaggcccaacacaaatttgtaaactttctttctttgttttttttttttttgaacgaagttttgctcttgttgcccaggctggagcgcagtggcgtgatctcggctcactgcaaccttgcctcccatgttcaagcgattcttctgcctcagcctcctgagtagctgggattacaggcgcccaccaccacgcccggctgatttttgtatatttagtagtaacagggtttcaccatgttgaccaggctggtcttgaacttctgacctcaggtgatccacctgcctcggcctcccaaagtgctgggattacaggcatgagccaccatgcccagcctcaaatttgtaaactttcttaaaacattatgagattttttgtgtgtgtgattttttttcttcttccaatgtggcccagggaagccaaaagaatggatacccctgtttaaaatcttcttaatctatagccatttctcctcttcttttttccccctttgccatttatttgtttaaaaaagtcatatcatttgccctatacaacttctcatattctgcatttgactgattacatctatttatttatttatttacttttcttagatggagtctcgttctgttgcccaggctgctggagtgcagtggtgtgatcttggctcactgcaacgtccacctccagggttcaagctattctcctgcctcagcctcctgagtagctgggactacaggcgcatgccaccacgcctggctaattttcgtatttttagtagagatggggtttcaccatgttggccaggctggtcttgaactcctgacctccagtgatcaacctgcctcagcctcccaaagtgctgggattacaggcatgagccactgtgcctggcccagtttttccaatatttaaacaaccaacctgtgctatagcaagtttcccagtcaaggattcatttatgttcaagcatgctacttataaaataatacagtatattgatccatttataaaattatgcaatatattgattcattttagaatttcctttaaaggctttcttgggtgactaccaattaaccaaaattaattacgttatcccaatgaccaaattaatcccctggtcaaattgaactggatacatgagttatgtgaaaaaccttccaggggttttcacatgtactgatgtttttgttttgtttttttttgtttttgtttttgtttgagatggagtctcaaacaaaactccagtttcccaggctggaatgcaatggcatgatgtcgactcactgcaacctctacctcctgggttcaaagattctcctgcctcggcctcctgagtagctgggattacagctgcccaccaccatacccggctaatttttaaaaatatttttagtagagacaggatttcaccatgttggccaggctgatcttgaactcttgacctcaggtgatccacctgcctcggcctccccaagtactgggattacaggcatgagccactgcgcctggccgtactgatgtttttgattctctggttatacttgaggtagagtaaatgattctaaccagcactggaaccattaaaggaatgtagggcctcgtcagtattagttggttggagaggggaaggaagttaggaccaggcaggaatgagtgggtggagaaactgactcagccgtttggttggcttctaggcatgggaattcagcggagggagccagacctcctatgcatatgatggtagcaagagtagccctcattttattcctgccctttctaatcaggataggcttaggacatgagcagtgggatgtttagtgacatcggcaatgaaggactaggaaatacagactttgatttattttttaagtgattctccatcagctgtgtgcttttaagactagactatgggtttttttgttttgttttgtttttgagactgggtctcattctgtcacccaggctggagttactgtggtgcaaccatagttcattgccacttcaaactctgggactcaagtgatcctctcacctcagcctcttgagtagctgggactacaggtgtgtgccaccacatccagctaattttaaaattttttgtggatacgggatctctgtatgttggcctggctggtagactgtgtttttatttgaatatttgtaccaaaacttaacattctgctgcttattgattatattttactacctaagaaaataaatatgtattatttttaattggcttatataaaacataatacctgttttcttgtagcttttaagtaaaatttgaagcattagatttttaagtgtaggttctttaggttctttttttttttttttgagacggggttttgctcttgttactcaggctggagtgcaatggatcacggctcactgcagcctcgcctcccaggttcaagcgattctcctgcctcagcctcccgagtagctgggactacagaggtgtgccaccatgcccggctaatttttgcatttttagtagagacagagtttcaccatgttggtcaggctggtcttgaactcttgacctcaaatgatccacccccctcggcttcccaaagtgctgggattataggcataagccaccactcccggccaagtatagcttattttcttatttgtaatttattaaagccaaagacaccaagattgaaagcaactgaaaatgaaaatgatatttccggggaggctaataacttacggagctttcctgtggcctcagggtcattgttctctgttagccaatccttagaaattgctagaactcataggaatgcagagttgtatgatgagaagaacaagaacttgggtttcagggagatcagggtaaccttgggcaaggtctctgagtctaggttcccttatctgtaaaatgtctcatgaagtcatgtgagagttaattgttataaagcttggccactcgaaggggcttaatgaatgtgagttatcttcctttctcccagtcctgattttgcaaacctacctactccgtgtttctgctaatcaccagaatgaaacttaaaaaaaaaaagaaaaagctgatggtttaatcttgattttcagtgtcagttaagcataaaataattctattgttttcttatgtgcataaggcttaactttcattggtttttgatgatctctgcatgttatatatggtacatattaaatatagtggccatatttttttttaatttcttttataatatttttttcgagatggagtctagctctgtctcccaggctggagtgcagtggcgtaatcttggctcactgcagcctcagcctccgcctcctgggttcaagcaattctcctgcctcagcctccccagtatctgggactacaggcatgcgccacaatacccagctaatttttgtatttttagtagagacagggtttcaccacgttggccagactggtctcgaactcctgacctcaagtgataggcccacctcaccctcccaaagtgctgggattacaggcgtgagccactgtgcccagcagctatattttataaaccaaaaaattgggacttgtggtgtgataagtatagtatacttaggaaggttaggagaacagaatattttgaagaagtgcactctcagagaaatggtcgctgtgcttttatgtattcataaggaagcagtacaaagttgtggttaggaatgaggccctagagtcctttggacatgaattcacatcttggcccaggcactttctacttactgcacaatatacttaacctttctaagcttcagagcttcctcacttgtaaagtggatattatgagagttccttgtttcttgtgaggattgcatgaaataaagggctcagcacagtcttggcagatagaacttaacatgtaaatgtcagctgttatgtttattactgtaaagcctttgatacgtgcacacttatacagtaaactttttttttttttgcaaaaacctgttcaaaaagcacttctaaaataactcaatatttgcaaacttactctatagtaagttctttatcaggcctcgtacagaaagggcacagaaatattttgaagaccgcatgccctgtcttgcatgcccactgggaagacctgactgactttggccttctcaaaatatttgcataactctcagcacctactccattgcttctgagatgacctctgcaacgtgtatatgttttggctgatacagccaaacttgtcctggacagacttcaaggttcacttaatctactgtcacaggcttctttccctaagattttcttggttgtgccctccctagagtattggcttcttcctcaggctagcagcaaaatagctgcagtaggcctaggccccagatttatgtatggcacccacctaaggaatagaaagattgtcttggctgggcgcggtggcttacacccgtaaaatacctgtaatcccagcactgtgggaagccgaggcgggtggatcacctgaggtcaggaattcgagaccagcctgaccaacatggtgaaaccccgtctctactaaaaatacaaaaaattagccgtgtgtgatggtagacgcctgtagtcccagctactcgggaggctgaggcaggagaatcgcttgaacctgggaggtggaggttgcagtgagctgaggtcacaccactgcactccgacctgggcaacaagagcaaaactccgcctcaaaaaaaaaaaaaaaaaagattgttccttagagtgagaatttttctcagaagcctccagagaactaccctagaatctcattggcctggactgggtcatatgctcattcctgagccaatttttgttagtagggcaatgtgatgccctgatgggcttaggcctggttcttgaacaagccatttacaagagggatgaaattatctctagaccattcagaaacagaattgtgtttctgttaggaaaatttttttttttctatgagtaggtgaatggacgctgagtagattggtcgaagaggaattgtgttggctgctgataacagtgctttaaagaagacaggttatttttctctcaaaaaatattaagtccaaagtagatagtctgttcctggcatggcagttccacagtgccatcaggcagcctagatctttctctctttctgtttcaccatgcttatcacacagcttgcagtcaccaagtggtcgcacgtgttggctctggctctctagccaaacggtctttgaggcaggaagaagtaggaaaggggagggcagaggacaccctttaaagtaccctaagtcccaaccaccatgttcagtttacatctcattgtccattcttacttgtgaagaaggctggtaaatgcagtttcttagctgtacacattgccattccccaaaacagggattctgcagctgtggaagaatgagaaatagatacaagcctggaagtgggcagtgcccaccacaggaggcggccaacaatgtcagctataccctgtatttggagaaaattgcagtttttacattgactttcctctttcttttcttttcttttctttctttctttccttccttctttcttttttttttttttttttttttttttttgagatggaatcttgctctgtggcctgagctggagtacggtggcacaatcttggttcactacaacctccacctcctgggttcaagcaattcccctgcctcagcttctggagtagctaggattacaggcgtgccccaccatgcccagctaatttttgtatttttagtagagacagggttttgccatgttggccaggccagtctcgaactcctgacctcaggtgatccacccaccttggcctcccaaagtgctggggttacaggtgtgagccactgcgcctgcaatgcccggcctgcattataaatatttgttcataatgtgttgctaacagtgacaatcaataagaatcaactgggtttgttccccagcctgtttagttttattattgtgattacaaaataattaaatattatgttaaccaatgaaatgtaaagggaaaaaggaaaaaagatactgcttttatgaaaaataagttgaatgtgcttacctgataaaggcaaatggctaagaaaaaatatttttgtcaaattaggggtggaagagacctctgaaaagattgaagaaaaaaattataaaaatatggagattctgacagatagggtaactctcacctgtaatcctagcactgggaggctgaggcaggaagattacttgaggccaggagtttgagaccaatctgggcaacagtgagaccccgtctctacaaaaagaaaattagccagatgtggtggtgtgtccctgtagtcctagctacttgggaggctgaagtgggaggatcacttaagcccaggagtttgaagttacagtgaactatcatcacgccactgtacttactccagcctgggacacagagtaagaccctgtctccaaaacatatatatacatatatgtttctgccttcagaacacttcacaagtatcattccagtaaaaactgaaaatcatagatgtacatcatgagtgtagttcatgcagaaactttaattgcttgaacttactctcaagaaaaggccttcactgggcacagtggctcatgtctataatcccagcactttgggaggctgaggcaggtggattacttgagtccaggagttcgagacacaagcctgggaaatacagcaaaaccctgtctctacaaaaaatacaaaaattagcaggttgtggtggtgcatgcctgtactcccaactactcggaggctgaggtgggagaatcacctgagcccagggaggttgaggctgcagtgagccatgatcatgccattgcagtccagcatgggtgacagggagagaccctgtctcagagaagagaaggagaggagagaggagaggagaggctttcatcccttagccagtatttggaaaataaacatgcatttttaatgattcctctctttaactgtattttttaaaaaatgagttataccattattagttctgattccatcaaggagagaacttctactttgtttcttaagttgttatgtatgggttactgtgtatcaattgaaatgaatatcaccaggccttattgttggtcattataaattgtgccctggtgaacttctttccagagacatcttctctagtatattttttgtttttttgagttcttttttttttgagacagagtcttactttgttgcttatgctggagtgcaatggtacaatcttggatcactgtagcctctaccttcccagttcaggcgattctcctgcctcagccccccgggtagctgggactacaggcatgcaccaccactcccggctaatttttgtatttttagtagaaacggggtttcaccatgttgaccaggttggtctcgagctcctgacctcaggtaattccacccgtctcagcgtcccaaagtgctgggattacagatatgagccactgcacccaggcccctcactgattttaaataatgtgaagtttggaatgtctcagggagttcaatgtaatggaatttgtcctgatgttatttctttttccaaatcacatagcacttcaaacttttctttttataacatttctcataaatagtcctcctccataattacctttgtgtttattttgtgtctgctactaaactcttagcttgttgaggacaggagtccttccttggacctctgtacatcctaacatacaatgggtgctcaatttatgttcatggaatgagagaatgaatcaatgtcactgtcttctattattgcatagacatcttcagtaacacttcctttgaattcattgtcagtggagctagtcttgtagccttttcaatagcttacattccgtgttggagcaaaaaatgttaaatgtttataaggtaatttcaaatataagcaaaagtagagagaatggtataaagaaacctccattatctataatcaagcttcaacaattaccagcattttagagcaaattttgatttaggataagggtagagagaatatgatgacatcaggatgctgattttgattttgtggggagagaagcaggccatgtgtggtgagcagggtagagaaagaggaggctggtggcccaaatacaaacctgcctcataggagttgtcttgaggatcacttgagttgacataggaaagtgggaagaacaatgcctcacacatggtgagtacagcctaagtgctcccaccaccattactatcactcctgcgtagtttgtgggagctgaatgtgggagctgtggcacttactaacttggtgactttggacaccgacctttctgagctgcagtttcttcgtcggaaaaaatgggaatagtaataacatcttaaacatagcattggcggggcgcggttgctcattcctgtaatcccagcagtttgggaggccaaggtgggcggatcatttcaattcaggaatttgagaccagcctaaccaacatggtgttggttttaatggagaaccctgttctccattaaaaataggctgggcatggtggctcatgacttgtaattccagcactttgagaggctgaggcaggcggatcactggagatcaggagttcgagatcagcctggccaacatggtgaaacctcgtctctactaaaaatacaaaaaattagccgggtgtggtgttgtgcacctgtaatcccagctactcaggatgctggggcaggagaattacttgaacttgggaggtggaggttgcagtgagccgagatcgcacaactgcactccagcctggatgatagagcaagactgtctagaaaaacaaaaaaacccaaaaaaggtagcatcttatcccacacaggcagtggaataatatatgtaaatatgttctgggttaattaacattaatcacaattttccagagtggttttctagtctggagggagggaccatgtttctggaggttttttcgggagtcaagccaattccttctgtgtattctcattctgagacttcataatattcgtggcagagtcatttgtcagcctagcaaataaacattacaggacaataggctttgtttccgtttgcaaaatgttttttaaataatgaaaacaattttactttatgtagcttgtccatatatgcactgaaaatgaaatacttatcaaccaagttgataaagggataaaaatagttttcctaaggaaaactatttgctggggatttgtgttggacaagttttgtagcagtctgtttccccgtctttgaaatataaacagcatctttatttgtctagattttgcttataacaatttgctcaactcctaattaaagatagctctgtcatccacacatcacttagctactttcctaaagccagaatttctttagaaaatcagttttcttttaagacttcaaaacactttgccttctccttagtactataaagaattctaattatgtaggacattcatccagccactcctcccaccacacacacacacacacacacacacacacacacacacacacacacacacatatatctgtctgagataataattagatactgtgggaagagaaatgaaatatccctgatggttttaataattttctgcagtgtttgtttggacaagaaaatcagctgtcacatcccctgggtatgagagttatataaacccagatcagaaagtcaatgctgcagacttaaattctcaggaagttttaaaacttttaaaactaccacttgccttttggatttgactttttaaaagtttgatttttgctttttcagatactaaacttttggcattcttagtatttgtgatttatagcatcttgtacttttatagacttacttattcaaacaaactaaacccccactctatgcccagataacaaaaaaacacgtacaagatacagttttatctcaaaatgagcaatatcctgaagctatcatttggtcccagtgacatatgaactgttcgtttttttccccatatactgttctgtgtaaatgttctattacacagtctttttttctggattatttttctggagatttcgttatactttgttgatgtttcttttcaaaagctcccgcacaaatcatctccagtagtcatccagccagtgttgtactagaagatgtgttacttctaatttaaacttccatttaaggcttgacgctgtggctcacacctataatcgcagcactttgggaggccaaggcaggaggatcacttgagcccaggagttcaagaccagcctgggcaacaaagtaaaaccccatctctacgaaaaatggaaaaaaatagctgacatggtatcacatgcttgtagtctcagctacttgggaggctgaggtgcgaagatggcttgagcccgggaggtagaagctgcagtgagctgtgtttgccccactgcaccccagcctgggtaacagcatgagatcttttctcaaaagaaaacaaacttccatttgagaaagtgacagaaaagttttggatttttgtaattataggaattctttacttttctttgataatattatatctctttcagtgaaaagggagttaggaagagatctaaatgtactctttgatcttccttgttaatcatttaaaaatggaattcggagctaattttaacttctgaaggacctgggggaattttatctagcacctgaggtataccttagttttttatgtattgaatctttaggaccagttttattctttcatttaaatatgtagtgagcatctagtatgtgcttaccattgtgctgtgtgtttatatatattatctcatttaattctcacacaagcgttgttagatacataaaaggggacttcaaaaaattcatggaaaaaattgaattaaaagataaaaatgaaaaatataaactttatttctcaatataaactccatcaagttcaaggcaatattgtagtgatgataccggccatttagcccgtccctaaagaactgagggttctggaaatttagccatattaatgcagtcttttttacattattaactgaaaaaaaaaatggattccctttaaagatttcttaagattaggaaacaaaaagaagtcagaaagagccaaatcaggactgtaaggtggatgcataatgatttctgtgcacagtgatttcccattgaaatctcgcaaaaattgcccttgtttgataaaaggaatgagcaggaggagtgttgtcatggtggagaaggactctggtgaagctttcccaggcgtttttgtgctaaagctttggccactgtgcccagccacaactttcattttgttaagtcatctaatccttacaactgctccatgaaataggtactattattatccttatgttacagatggagaaactgaggcagagagcgggacagtaacctgcctaaggtcccagagctctagagtcagtggtcttaacctctattatgacctctcacttaatgagggccagatttcccctctagctttttattatgaaaaatttcaaatgtggaaaaaaattaacaagagtacaatgagcacctgtatcaaaaacctagcccaaacaattgttaacattttgctgcatatagtttatctgcatgtgtgtatttcaattttttgctgaactatttgaaaatatattatggacattataattcactccttaaatacaaaacaaagcaacattttcctgttttttttttgagacggagtcttgctctgtcgcccaggctggagtgcagtgatgctcactgcaagcttcgcctcccgggttcacaccactctcctgcctcagcctccccagcagctgggactacaggcacacgccgccacgcctggctaatttttttgtatttttagtagagacggggtttcaccgtgttagccaggatagtcttgatctcctgaccttgtgatctgcccacctcggcctcccaaagtgctgggattacaggcgtgagccaccgcgcccggcccaacattttccttttacttggtaaatgcattcttggaaaatacattgcctctaaaatcatgcaaaagtactttgctacagacaaaaaggagtggagttctaggttcagataactgtaaagagctttacatgagtatcttgatatttaaaaatcaagcagagtaaagggacaatttttgtttctataagacagcccctcaatttgctggatgtttaacatcttggtctctacctactaaatgcccatttgaatgaggagacaattgactgttgtgtcaaccaaaaaatgcctcccatcccctccgtttccagaaagtcctctagccagctgtgcctgttgagtgtcattgacttgactggtcttctgctgaaggagctataggttaaattaaaataaaatgtgctgtcacagaatccttatcatcatgattcagagttgaggtaataaaggtggtagaacttatctgtaattctcctttagttctacaaccacatatgctctagatttgtaaacaaatattcatttattctgttgtattctaccaccaccactttgttccacaaaaggttatacagcagatttttatttatttaaccattaagagtgtctccccgtgtattggaatcggctaggaaatattcgtaattgctacacttttctatataaaaagggacttgaagcagactcagggccaacacaatgtagaatctgtttcttctagctttatttctccctgtgctgctagaggtaccaaagggtttgtctcaactgttactacccctgacatattccattgatctctttacttttctctgttgtctgtcagtctgtttgtcagacttatctcaaatgccacgttgtttgcgcgtatttctcaaagccatccatcaggatacaatctaaatcatcacagcacattctgtcttgtgacactaagcacagactgcctgtgttacatttgattgtgtgtttcccttttcttccacatatgtttcagtagtaatttcctgggcaacttatgtgtggcgggccttgtttgggatcttggaaatagagagatgaagctctcctacatagtctcatttacttccaattttgctttcttgataattggagtagccttttctagcttgtatcccctgcagtacctgatgcattgccttgctcagggtaattcatatatatttctgaattcagtttggaatgaaaggagacaagcaggcacttttgaatcaaatctggtgctgccactatgcaactgtatataaatctaacccaacccctgtgcgccaggttccttatctgtaaaacatggataataacaaccatcttacaggattgttgtaaagtttaaagatgaattgtatgaagcctagcagagttattggcacgtagtaggtgctcatgaagtagttgttattgtaagggaggttcagtcattcctttaggtcacttgagtgggcagtggaagcatttaggatcttaattgtctttagggaaatgcttacttagtctgggggcttctccgagaagcaggctctggggaaggtctggctcattgctgattaactgttccctttttagagtcaatgatctgagtctgtgttttggaaccacttatataatgtataccacctgttatttgtgtatttttagaagtgggagtcgggtaatcctagtcctgtcagtaaaagagcaaactgtttaccagaagcagagcttttttcttaacactgactcacactgactcatctttctcatttttcttcccaccgcctcataacaaccttgcaagagagagaatttttagggaatcagttgacttacttttttgtgattttccaaagttgaaagcttgaaggtatcaggtcattaattccatcccaggaaaggctaaagtttatgctgcctcggagtgccagtatgaccaacgccatgtagtgaatatctcacataaacccttgtctagacaaaccacttctgttggctgagaggttagacaagtgcctgaagtgtacatgttaagagtaaacacattttgctctttgaaaatggttgccttaagttgaacctggaaagtttgctcttctgagataggaaacccaagcagtattagagtcagagctgtggtagcttcacagatggatttcagataacagagaggccagacagcacattagatcagcaaaatggtgaaggaagctttatagatcagaatgactgatatctttgtgccttcatttaacattcattaaatgaacatttactgatcatctgtgatatacttggtgctagggttatgacagtgactaataaaaacatagtgcctgctgtcatggaccttatactctaatgctcgtttatagtaaatgctaagggaacagagagatgccttggcctgcatatgtgaacatgttcctgtgcacacgggtgaggggaggaaggaaggctccttggaggaaaaggcacccaagctgagtctggtggggtgagtaggcattaactaggagaaaagggttagttaggggaatgtggggttggctgaagagtattacatgctgaaatgagctatgagtcttggggtcgagagaagagcttgcccttggagaagctgaaaaaagtgaccaaaggacagtgagagggaagtttggcacaaaataaattcagagaagctaacagtgacagcagagcattgtagaccagtttattaatttaaaaaaaaatttttttttttttgagacagaatcttgctctgtcgcccaggctggagtgctgtgatatgatctcaatctcagttcactgcaacctctgcctcgcaggctcaagcaattctcgtgcctcagccttcccagtacctgggattacaggcacacaccaccatgcctggctaattttttttttgtatttttagtagagacagggtttcaccatgttggtcaggctggtctcgaactccggcctcaagtgattcacccacctcagcctcccaaagtgctaggattataagtgtgagccactgtgcaaggcctaaaaaattttttaatccagataaatttaacatatagtgaaatgctcatgacaaatgcatatacctatgtaaccaacaccccattttgagtaggaacttttaacttggtagtcagagcaaggggaaggatgggtttttgagcagggtccagacttgatgctaattgctagctaagaactgggacaagggtgagggggtgagggggtggcaagtaccagtggggacagagctggaataggcagtagtttgctggtgggcaggagcttccagcttgggggcaaaaaacagattcttggttttcctaacttgtttttagcagaggacaaacctctaagtgctttgtaagatccaaagtgtctatgcagaagacaacagactgtgttttttcaaagattttctgggaagacttccaggctacctgcagtttgaagaaagtcttctgaaaagggcagggggcgtgggggcacctacagagacaggatttcccccaactcgataagatacaggaaaataatcatcttattgatttacttttgttctatagtaatgtgacattttttcttttctgagagtagggtattaaaaattgttacggttttgggttttacagatttgttgaagcttaatatcatttaagtgtcctattttaatatctgttttaatatctgtatttttgacagactgccagaaatcatttaacatgttactgtgctatttttgttgatgttgtcattattatttttgttgatgttattcttaaagaaaaaagaaaagatactatcgatagaattatcgtcagtattagaaattaagaaatgttttaatttcaattgaaaacaaacaagtaaacaaacatgaaaatgtattgagagatgtgtgtattctctacctttgttttattccttttacaaaaactataaggaatagtgcttaacagtgtactgtcaaaacactgacatctatttacaggaagttcatttctgaccagaattgtttgtttgtctctccaaagcttgccaaattctataggttttatgtaagtttataaatattcttgtaaacattggctttaaactaaatccttctaaatatccaaactaccatgtatctttctgtgtctaaattcagagataccatcctgttggctttagataagttacagagtagtttaggcccacatgatttaagctcacccacagttctttgttgatacttgaggatttcatctgaaaagcatcctgttcatactctgaaaatatttctttcatcttagtactcccactcattttgtgtgtgtatatgtgtatagattattttattgttccacatatatgtatatttattttttgtccacttgctagggaacctcattttttttaacaagaaaatacttgtgtgataaggtcataaaacccaagagttgggaggaatattagagacctactttatttattttattttattttatttttttgagacggagtctcgctgtgtcacccaggctggaatagtgcaatggcgtgatctctgctcacggcaacttctgcctcccaggttcaggcgattctcctgcctcagcctcccaagtagctgggactacaggtgcgtgccaccatgcctggctaatttttgtatttttagtagaggcagggtttcaccctgttagccaggatggtctcgatctcctgaactcatgattcacccgccttggcctcccaaagtgctgggattacaggcatgagccaccacacccagcctagagacctaatttaaagtttattgctgctttattactctgaacaactacatcatttattacctaaaataatctttttattttctgttctcatttagctgaatctctgagcttaaaaaaagtgtgtttggcttatatatcacattatcccacatatgttacaaccaaaacttaattattagccataatagtgtcttttggctaatattagtagtaagatttttgtttgtttgtttgttttttgagatggagtctggttctgtcacccaggctggaatgcagtggcgcgatctcggctcactgcaacctctgcctcctgggttcaagtgattctcctgtctcagccttctgagtagctgggattacaagcgtgtgccaccatgcctggctaatttttgtatttttagtagagacggggtttcaccatgttggccacgctggtcttgaactcctgacctcaggtgatctgccccccttgtcctctcaaagtgctgggattacaggcatgagccaccgcgcctggccaatagtagtaagttaatgaagatctgtactaaatttggattccaagtgaaacatttctttttttcttttttatttatggcagagtagagggttgatagatatttgttggctttattagttttctcaaattggtatgtaaaaataatactagatatataggtttaagtctccttcataagattttctttcttctaaacctttggaatatgccatgcttttcaaaaagccccactcattatttttatgatagtggaataaaagtctccaatttgtcaagctcattattcaagccttccaggattgtttgcagttttaaaataaactgctgggggttttatgcatcttgcaatatgagtacttaattaaaattaaaaagggggccatgcatctatctattctattaaggtcgtatataaataaatgattttattgggattttcagtgtatttagagtaatctatacttaatgagagggacttgtacttttcatttctttgtactatttttcagcctttcctgaacagtaaatgttttaaaaaaaactatacccttattccttggtctctaagaactgtggtgggctgggcgcggtggctcacccctgtaatcccagcacttcgggaggcaaaggaaggtgggtcacttgacaaggtcaggagttggagaccagcctggccaacgtggtggaacctcgtctccactaaaaagacaaaaattagctggtgtggtggcgagcgcctgtagtcccagctactcgggaggttgctgcaggggaattgcgtgaacctgggaggcagaggttgctgtgagccgagatcgcaccactgcactccagctgggtgacaggtgacaggtgacaaaaaaaaaaaaaaaaaaggccaggtgcggtggcttacgcctgtaatcccaacactttgggaggctgaggtgggtggatcacaaggtcaggagatagagaccatcctggctaacacaatgaaacactgtctctactaaaaaaaaaaaaaaaaaattagccagccgtggtggcgggcacctgtagtcccagctgctcaggaggctgaggcaggagaatggcgtgaacctggcaggtggagcttgcagtgagtgaagatcacgccactgcactccagcctgggtggcagagcaagactccatctcaaaaaataaaaaataataaaaaaaaaagctgtggtggagtatatggtacaaacatgagacttggtgctcttttggattcctaaggcttttccatgtctgagaactcaggaggcagcctttgcatagcagagggactaggaacctcactatttctccaaagttgactagctttctataagataacccccataaaatcactagtcattagtaataaaactttgtctttaaatgactataatatttttaaaaaggacaatgaatatgtactctatgccatccctttccatactgtaaatgtgtttctgaaaggtatgctatttagatatacttgagtcctattctaatatacggagaggttgctttttaaattgtcctcatcattgtggtagtaatagtaatattagtagtactggtagttaacatttatggaacacttcatatattttacatacatagcttcctttaacccttataataatcctatgagttaggcattttattctctccattttgtgggtgggagaactgagacttgatatgtggactatatgattgatcgattggttgattttggtaaagttcagatatcttttgtcctgtgcttgacactctaaaatagtaagtatttgggtaacaaataattgtaagagagagaaaatcatcttatcttttggactattcccttctattccattcctactgccaacactccagtccaacctcacatttctttttctttctttttttcttttttctttctttctttctttctttctttctttctttctttctcattctttctttttcattctttctttttttctttctccttccttccttcctctctctctttctttctttctctttttctctctcttctctttctttcttcccttctttcccttccttcccttccttcctttcttttcattttctttctttctttcttacagggtcttgctctgttgcccaggctggagtgcagtggcatgatgacagctcactgcagcctccacctccacagctcaagtgatgctcctgcctcagtctcccaagtagctgggactataaatgcgtgccactgtgcccagctaataaagctccttctgctgaagttatgcctaaacccttctttgcacatgtcattccttatcacttatcacctaaagaatgacagggggctttggctttgaatggccctcagtatgtataagcacctaaagatttcagtttatctcagcttcagagcagtccatctcatctgcctgtttttcttcttaaaataaacttttaaaaaataattaaagtttttaaaaggtgcagaatatttaagtaagatttcttctcccctttcccctaaatctccattctcatttcgtagaagtaaaccattcttaacaatttcctggataattcttccagaaattatgcatgtccaaacataaatataaaatctattggttgcttaaaaaatctataaatgagatcatattatacaaactattctactgctattgttcacatagatacattttattcttttaaatgacttcatggttgtatcacttacaaaccttttggctttgagtaacagaagcagggaatgtacagaaggggtgtcagacaaggcttccaaattatcagaaccaaggcaggccagggaatcatcatcctgttttagctgaagcagccaggccagtatgttgccatcactgcccttggacactgtcaggaataaattccaactgttcctttgtcatagtgtcattttttaaggttcagagtcccagtgagactatgcacaatggggaagtacccccaaatagaaagaagtgactggatgttggaaaacttaaaaaatgatacatttccattacattggtattctattgtataaacatgccataatttatgtattaataactagccacttcttggtgaatattcagattgtcatattcaattttttactagcaaaaaccactgctgcaaagaaaattatttatgtctttgtgcatttttgtaagtatatctgtgagattaatttcaagaagactgtgctggatcagagagtatgtatatttaacattttgatgtagcgccgggcatggtggctcatgcctgtaattccaaaactgagaggctgaggtgggcggatcacttgagctcatgagttccagaccagcctgggcaacatttttttcatgggcaaaacccggagaagaaaatatgaaaaaaatacaaaaaaaaaaagaaagaaggaaagaaaaaagaaaattagctgggcatggtgttgcacacctgtagttccagctactcaggaggctgaggtgggaggatggtttgagctggggaggcggaggttgcagtgaccagagattgtgccactgcacaggagcctaggtgatagagccagaccttgtctctaaataaataaataaataaataaataaataaataccattgtgatgtatattgtaattcatgcttagaagctttcactggtttacactcccatctacaaagtgaactggcttttaacttacaagatacaaagttatttatggccatatattcagcaaaagccacaaagtgtcacaccaggtgaaaagggaagtccaagtttctgaggtatagagtttcagtatttatcaggtaagcatagctaccaaagccatttttgttctggaagcatttgctgatcccgagaaagcattttttaggttaagctgtatttttggtgtcttcatatatgaggacagaattcttagcttgttgtccgtcaaggatggggaatcagataaaccacttttttagtttgaatggaacccctaagggcataagagggaacttgaactaagccaaccctcacaatagccttgccaccaagcttctaggtgtagggaatgtagaccaagatctttcatcattatggttctcaagtaataatgccatcaggcagctggcagaagcaaatgcaaattttctctcgaggaagatgttatcatcccggacatcaaaatagtcctctaaataattttttatgtaatcactagcacatgggattaaaaccaggttcacaaagaaataagataccatgaaaagaattagcaaaagccatatacaacaaaagtatcaaagccatgagatactggaatttcagatgcagaatgtaaaacactgtatttactatgcaaaaagaaatagaagccaagataaaaacgtcacaatgggccgggtgtgatggctcacgcctgtaatcccagccctttgggaggcctaggcaggtggatcaccaggtcaggaattcaagaccagcctgaccaacatagtgaaaccccatctctactaaaaatacaaaaaattagctggatgtggtggcgggcgcctgtgatctcagctacttgagaggctgaggcaggagaatcgcttgaacccgggaggcagaagttgcagtgagccgagatcgcaccagtgtattccagcctgggtgacagtgcgagactccgtctcaaaaaaaaaaagtcagtaagtagacactgtcaaaagtgacagcagatttgaaaaaatccaaatagacattctagaaccaaaacatataataatcaaaaacaagaatgcagtggatgtatttaaagtagattacctagcaagagagaactagtgaactagaagatagaagaaaattctccagaataaaccttcaagagatttaaaaaatgtaaaatatagaaaagatgattagagaattaaaacgatccagtgacaagttctaatatgcatttaaaaaaatttttttttcaagttttttcttgctgcagtgtccaggctgaagtgcagtggctattcccaggtgagatcatggcacactgtggcctcaaacttctggcctcaagtgatcctcccacctcaggtaaataggtgggactgcgcccagctttaatatacatttaattagaattacaaaatgagtggagcaagaatggtgcagaagcaatatttgaagagataattgatgatcattttctagaactgcagaaagatgaatttgcagattcaaaagtgtatagccttaaagaaaagctaaaagctaaaaactgagcaagcatccatcttgtaagtcagatcacattttgtaagtcagagaaaacacagcaaaataattctgaagaagataaagagaagctaggcatggtggtgcatgcctgtagtccaagctgcttggaaggctgcaatgggaagattgcttgagttggaggccagcctgggcagcatagtgagaccccacctaccctgtctctaaaagaaagaaaataaagggaaagaaagaatgaaaagagtagaagttatgaagtataaagcaaatgtatagcagggaaaatcaatgaagccaaagtatgattcttagaaaagattaataaaaatgataatactctgattaggttgatcaagaaaaggaagacagaaataaagaaaggagcacaaataaccaaaatcaagaatgaaaaagagggggctgggcccagcctttaatcccagtactttgggggaccgaggcgggcaaatcacttgagctccggagtttgagaccagcctgggcaacatggccaaacgccatctctacaaaaattagccaggtgtggtggtgtgtgcctgtagtcccagccactcaggatgctgaggtgggaggatggcttgagtcttggagggggaggctgcagtgagcctagatcgtgccactgcactccagcctaggggacacagtgagaccctgtctcaaaaaaaaaaaaaaaaaaagagtgcttaaaaaaaaagagtgaaaaagggagatagtatactcattaacaaaataatgatactatgaatactatgaataattttaaaccaaaattttgaaaatttagatgaatggataaatttattagtaatataactattaataaaaatggagtcatctgggcatggtggctcacgcctgtaatcccaccactttgggaggccaaggcaggaggatcacctaaggtcagaagttcgagaccagtctggccaacatggcgaaaccccatctctactaaaaatacaaaaattagctgggcgtggtggcctgtgccagctgcttgggagactgaagcaggagaatcgcttgaacccaggaggcggaggttgcagtgagtggagatcgtgccattgcactccagtctggttgaaagaatgagactccatttaaaaaaaaacagaaaccaaatggaatcagcagttaaactcttcccttaaagaagactactagcccatcactaggagtctaccaagcacttaagagaaagaattaatattacacaaatgcttcctgagaatagaaagagattagcaaaacaaaaaacctgacagtgacattatgagaaaggaaaaatcataagcccttttactcaggaaaatttctacattttactatgaaaaattcccaactatatattagcagagcacaatccaatattttacttattattgtagtataacaaactaccaaagttttgtggcttagaacaactgattttttttttttccagagattctgtgggtcggaagtttggactgggcacaacaaggatggtttgtttctgtttttgtctaggttcccagctgggaagactcataggagggcttggaatcaagcccttggcttgttgatctttgtcgtgtcaatttcttgtttttcttttttctgagacaggatcttgctctcttgcccaggctagagtacagtggcataatcatagctcattgtagcctcagcctcctgggctcaagcgatcctcctaccgcagcctcctgagtggctgtgactacaggcacatgccaccacaccttgctaatttttgtatttttttgtagagatgaggtcttactgtgttgcccagactggtctaaaactcctggactcacgtgatccttccacctcagcctcccaaagtgctgggattacaggcatgagccactgcacctggctgtctgtcttaccagtttctaaaatctctttatgggttaaggaaataagctatttatattgataggaaatataatttcctctagcctgacatttgatttttattttgctgatcatgctttttgccatgcagaatatttttatacatagtcaaatttattaatatttcctttaatgacttctggattttatatcatagtacttggaaataccttctccattgtgaggtcataaaatatgccatgtgtttttccagtgcttttatggtttcatatttttacatttggatttgtggatcctccaggagctatttttggggtgaggtaaaagactacttattaacctcgcttttctcagtcagatggagagattaattttgactgtggagaagggggctctggtaaagtatcttgatcatctcttagggtatgggattgtgaggaattactctcttttcacccaaaggaattggaatgagcatctgaagtcaaaactgcctctcctctacagcaggtgggaaaaattgttttaaactgaatcctttttcactgttccttctcatttcctaagactttctgctaccgtggtatcactggcctcatgacatgttatgattttgatctcgtttttgtactattttagtgttttttttttctgatgtcatgaaaggacacagcttcattttatgtataagctctctctaaattgtgatatagtgttgagttactgtgaattctagccgttgttattattattttttttagagatggggtcttgctgtgttttccacagcgagaatcagagctcctgggctcaagcctcctgcctcagcctcttgagtatctgggactacaggtgttcccggctttagccattatttctaggatcagttttggagggctctcctttcttgttttgttgtttgatcccaagtccatctcaggcagtggtctttctgtaactttctataacactccattcatttattatattataagataggctgtgaatataggagaaaacagaccttcatgatcatgatttcacattcctatcattgttccagacatgtataaacctctcagacctttgaggcttagtctaagataagtcctttgaacaaccagtaaaaatcattaataaaaataaagaaaatcagcaattctttttcttcattaggacgtgttgaccttgatacgaatactactatgctacttgttcttggatgaatgataccaactttgacctgggcgcttatgaaaatattttaaagcatcacttaaaaattacctttctcaccattctaactaaagcaataggttttgtgtgttagtgggtttttttctaatgtctacttatgttcatttattaagcgccttctgtttgtcaggccttctgctagtgctgggactatagagttgaataaaatataaaattttccatctactaagggagatagaatataacaagtagttataatgtacagtgctgtgaactataatagaagtgttattgggggcatgtattggtcaggattcttagtagcaaacaacaaaattcactgtagttggcataagcagaaaggtagttttaacatctgtgcttggatgttacacagatgaaagtgaagcaatcacagacaatatttccatgagaaatggtcaaccccactaagggggactcttctagagaaaacaccactgctgcctttaccagcactggtgacatcagatactggacatcagaaactgtcccataacagtcctagaacatgggcttataattttctttacgttttctagtgcagttagatgcagttagcccattcataatctttatatccttcatgcccttcattggtctatagcaactactactgggtttgaaatagccctgactttaatatggactttacctcaggcaatcataggtgattattttattatttatttagagacagagtattgctctgtcgcccaggctggagtgcagtggcacgatctcggctcactacaacctccgcctcccgggttcaagcaattctccctcctcagcctctcgcgtagctgggattataggcacccgccttcatgctcggctaatttttgtatttttgtagagatggggtttcaccatgttggctaggctggtctcgaactcctgacctcaggtgatctgcccaccttggcctcccaaagcactgggattacaggcgtgagccaccacacccagccaataggtgattattttaaaactcttacaacattgcatgccactaactacccgcatctcattctctaagacagagattgggaaactatggcctgcaggcaaaatccagcctgccacttgtttttgtaaataattagttttattggaatacagctatgttcattttgtttacacattgtgtgtggctgcttttgcactatagtggcagagttgagtagttaccacagagaccacaaagcctgaagtacttactgtctatccacttacagaaaaagcagaaaaagtttactagccgctgttgtaatgcttattaaattctctctgccttttaagtccagcaggtgaggtaaatcagtttctttcaaactttttgactttgaaaataagatgcacaatttatattatgactcatgcatgcatatcatatattatatgtaaatgaaacattttcttcttttcattctattctataccgtttcatgttttgaaaagtatgctagtcccagctgggcatggtggctcatgcctgtaattccagcactttgggaggccgaggcaggcagatcacttaaggccaggggttcgagaccagcctggccaacatggcgaaatcccgtctctactaaaaatacaaaaattagctggatgtggtggtgcacacttgtaatcccagctactcgggaggctttggcaggagaattgcttgaacccagaaggtagaggttacagtgagccaagattgtactactgtacttcagcctgggtgacagaccaagactgtctctaaataaataaataaaaataaaaatatgctagtcccagtctactaaattgatttcatgttccacaaatcagttgtaacccataggtacatgaataggcatgttccattcatgaattatccaagatctgtttcatttccttaggagttttgtctgcattcccttctggtttccattactcaatctgtcaggattctcaggtgctactaacaataagtgtctgctccagctggtttaagcagaaaagcatttcttaaaaaaaagtagggatcttacagaatcttatagagggccagataacagatcctagtgctacctagatggcagttaagcagcaaatgaaatgcaggctggggaaagccatctaactacaccatgagacttccctagagaaaaccctattcctgccattgcgcagcacctgtgaccctagggtctggctaccagatatcctgcaaggtcagccccgtaagaactcagtctctgtgattgtctcaccaaagctccttgaaggagggctctcctggctcaggagctcagaggctgctcagggcatttctaccttttggaatcctgcttcattttcatctcgctgttctaaaactcctaatttttcttctcctattttattttccttttcttcagctatctactttgctcctttccttctccttttcctttatcctcatactcatcttggccattcctatcatcaggtggcgtaactcaaggctgaggtccctgaacagagcttagagctcatttcttcccactttcagtgtaccttcaacggcttttctagctactcctcattgaggttgtccagcttgtgtttcttgtgcaccttccagtgccgggcacaggctgggcagcacaccttctgggccaggcccaggattaagaacaggagcagggccctagagactgagactgttcccggctgacagagtgtggcttatgtctctcttcaccatttttaatggccagacaatgtgtttgatattttgattatttctattatttcactattataaataactctgcctgtaatcccagcactttgggaggctgaggctggcagatcgcctgagcccaggtgtttgagatcagcctgggcaacatggtgaacccccgtctcacaaaaaaaatacaaaatgagctaggcatggtggcgcatgcctgtagtcccagctattcaggaagctgaagtgggaggatcacctgagtctgggaggtcgaggctgcaccatgatcatgccactgcactcgagcctgggtgacagaatgagaccctgtctgaaaataaataaataaataactctgatataaatgtctctctcatttataagtcagtgtatgcacattttgtagcacttggtatgtattttccaaaggaacttaaaaataacttttcgtattttttctttttgtagaagtaatgctatattttagtgtaaaatactattttatagaaaaaatttaaaataccaataagaaaataaaaattacccacagtgtcatcatcctgatatgctactgattaatagtttcttccatttttttctactttccgttttacagacatgagccccttctacatataggggctcaccttaacattaaagtgagacttttttttttttgagacaaagtcttactctgtcgcctgggctggggtacagtggcacaacctctgccgcctggtttcaagtgattctcctgcctcagcctcacgagtagctgagattacaggcacctgccaccgcgcctggctaatttttgtaattttagtagagacggcgtttcaccatcttggccaggctggtcttgaactcctgaccttgtgatccacctgcctcagcctcccaaattgctgggattacagtcgtgagccactgcacctggctcttatgtgactattttttttaatgtcatcagatattcttcgatagtatcatttattgtgactgtgtaatattccattctgtagatttaccaaagtttatttaaccactgcctaatagtggactttaaggattttcagttttacagttttctgaacagtgctgaagtgaacaactttaagtcaagtctttgcacacacatctatagtggtttctcttggatagattcttagatgtaagatgagtgggtcagagagcatttacattttttaattaagaaactttattttttagaccagttgtaggttcccagtgaaactgcacagcaagtacagagaggtcccatgtcccccctacatttttaaggatttcagcacatatcgtcaaattgccctttaggaatgttgtaccgttttccattttcacctacattttctcatatctctgcaacactgagaaatatcatttaaaagaaatctttgataaggcacatgtctagtagaatacctattccagtcaagctaagactaaattttctctctcctgaaatttatatttacattattcagtccattattatttattgtggttagtgatcacacagttccaccaaccttccttctttggccaatttaacaaaaattataaaactaatacatagacacaaaaataaacattcagaacagaaagatatagcgatgaaagtaaaaaaaatccccacttgctttagccaggccttctgaaagcggtttgttttttactttaatgcttttttgtaattgtggtggttacttccaaaactgtaaataaaatatacataaacatgtaatttttattttttttgttattttattttgtcattttatttatttttttttgaggtggagttttactcttgttgcccaggctgcagtgcagtggcgcgatctcggctcactgcaacctcggcctcccgagttcaagagattctcctgcttcagcctcccaagtagctgggattacaggtgtgagccttgccatatcgcacactccccgtgtaatcctgctgtccagagatatacaatttggtgtattgtatatccttttagagatttaaatgtaggctgggctcagtggctcacgcctgtaatcccagcactgtgggaggccaaggcatgaggattacttgagaccagaagtttgagaccagcctggcgacacagtgagaccctgtctccacaggaaatgaaaaaaattagccaggaatggtggtgcatgcctgtagtcctagttattccagaggctgagttgtgggagaatcacttgagactaggagtttgaggttacagcgagctatgatgatatcactgcactcctgcctgagttacagtgcaagaccctgtctcgaatgaatcaataaatatatcagtaacaacaaaacatggactgtgagccaggtactatgcatagtctcattaaatcctcatagtgtctgagatgggggcccttgtttaccaaaacgtaaacttgaaccttatggctaactggtgacttgcctaaacatttccagtatttcctatgataagttgtatgcaataaataagatgtatctaattatgtgttcttgtgtgatcatctccatttaatacatttccacaactaggatggtttggtttaaaaagtgtgcacatttaaactatttaaacttttgtatcatcctgagggaggtagtttagagtgtggactttgtcgtcatacataccagtatttagattctgactgccacttactggccactcactaaaatgaaactgtacatcagtttacctatctctaaaatggaaggataacagaagcctcatatggctgtgaagattaaatgagatgctgctgcaatgtccctggctagtgtgcagcacctaggaagaatggtgtccaagacagaccaggcccctcatctcatagaactgatattttaatgtgggacaggaggaggcagcagtgaaaggcagtaaagaaatgaatgaacaacaaaaaaaagtggtgctgtatggacgcttaacagaaagtgacatgataggtagatgggtggttattttaggttgggtggcttgggaaagtttttctgaagaagtgacatctcagctaaggtctcagtgataaggatagttttataattcaaaaattcctagaaataaaaacatgggatcaaacattacatgcattaggccaggcaccgtggctcacgcctgtaattccagcactttgggaggccgaggcgagtggatcacttgaagccaggagttcgagaccagcctggccaacatggtgaaaccccgtctatactaaaaatacaaaaattaaccggatgtggtggtgcaggcctgtaatcccagctacttgggaggctgaggcaggagaattgcttaaacccaggaggcggaggttgcagtgagctgagatcgtgctctcactacagcctatgcgatagagagactcaaataataataataataataataataatgacaaaatgacctgaaaaaatttttaaataatttgcattctatgtatagacatgcctctttttctttaccattaccagaacttttttcctaatgtaaaaaaaaagtggggttgttcaaagattgtcttagggaccttctaatgagctttactggcagagggaaaagataagaaaatgtgtaagtcccttttaggaatctcttctatttcctctccctgtgttaattgtctaccatcatccattatactataaaccgttgtcttcactttactggcctttttctttacaccacatcctgcctacattgtaggactggaagctgccaacatgcatgttaactaacaagcactttttcgtctttagaattaggcagtgcctgggtcaggggagatgcaagattcagaacagcaatgcttttgctataaaaacaaggcagcttttagggtagactggtttttccaaacaaattcattgttaaggctgtaacacgttctgtgagttaaaactgtgcagaaggctctgcacatatgtttgttacagttgagcctttttcctgtatggcatgcaatgggggcaatgggcattggtgaacactgtacactaccattgcttccacaggtaataagacctcttgtttgtaacgtgtatatgattacatattgtggatctgttctgaaagcctttaatcatcgtagaaacgttctctttgtagggcttgagcaggcctcagcatctttacgacaatatacatgtttttgtttgtttgttttgagacggagtctcgctctgttgcccaggctggggtgcagtggcacaatctcagctcattacaacctctgcctcccgggttcaagcaattctcctgcctcagcctccccagtagccgggattacaggtgcccaccaccacacccggctaatttttttgtgtttttagtagacacagggtttcaccatgttggtcaggctggtctccaactcctgacctcaagtgatccacccacctcagactcccaaagtgctgggattacaggcgtgagccaccacgccaggtcaatatacgtgttaaattatagacatcactcagttactgttttgttcatgtatggggcaaatatatatttttatagaatatacatgtattataatttaatttctgattcaagccttaaagaaaatatgtagttcaaacttggaaataaatggattaaaagtcacttgctcttaaaatgtggtttctttttataatcttttaaaattcagcaacttaaataaaacatcctgagggcaacatgtgttagtgagggggactgggggtggcgtggggagggagtgtgtttgatgaaattgtccaggagcaaagcaccacttacttgaagcccagagatttgtcatccaaatatgtgcagattgctgggctataaatagtttgaactcaagtaaacagcctcttctccctaactgctgcttggccattgttcagatgccagcacagactgaggagcatctcacaccaagctcaaggctcttgtgcccaaattttgggctgcttctcttgtggggagagcttcagctaccctgacttgagatgaccaagggtcacatgttcaccctctttagttatcccacgtttggctcccacccctatgcaacctgatgtacagtttcataaacatgcctctgctctgatgagtagcgctgatctaagaagattcctggcaactattaaaaagccctggggccccatggctgttgactgaagtagatttaggaagcacagaagttcttttttcagggcagaggcacgcatggctcatttctttctttggaactaagtagagtggcactggttgtcagaactgctgcaggctgcctgtgccagcaactcatctgctctgtgccaggcaggcaggctgctgacatttcaagagtccctttgaggactccagcaacatgctgtcattagagcaactgaggacagtccatagtttattagtatatttcctttggaaaaaatgtctccccctctctctctctttaaaattcctgctttagctgcattgctgcattcatgtgcagtgactcttatgtcaaatgcctatgaggagattatgactaatttaacattttgttgttgagaggacataaggaatggtagaaggagtactagattaaggatcaggagcctggattcttgcgcaagttacgtaacttttcctagctttgatttcttcatttgtcaagtaaagatagtcatgtccctcctgtttcttggggttgatgagaaaatttatgtaaaggtactttctggactataccgaacaaatggaatgcaaaggagaagtagggtaatggaaggagcttggtgtttgagtctcacaggcctcgcccacactgtgacctcaagcaagtggctaatgtctctcagcctcaaccttttcatctgtaaaatgggaacatctatacttgccttgcaggagtgttagaaggattagaaataacatatgtaaagcactgacaaatggcaaacaatagttgaatagcaataattgttattattacacttaatgtggatatattcactctgggtgatttaggattctaaacctaaggaagtattcagtttatagatgtagagattagcaaaaggccctgctagtaactgatagtagcaactgataataatagctaactttaaaaaatccaagtaatacatgaatatgactttttaaaaagtctctgagtctagaaaggcatctgtctcctgcttacccctcaccctgaggcagccattttatttttctgcttttacttcttttggtggttacttctatttctctaaataatgttactcccatttccttttttaaatgaattttgtttttgtcagaaaggtacatgcacatagtttgccttagtctttttaaggtcaaatatcataaaagatttgtaataaaaaccatctgttccctgcccccaccctttctttacccttcctcctatcctgctcccaagggcatacacttttgatccttttaggcgtttgatctagcatttatctctctatatctaaataatatgcttatcgagatatggttttttttaactgtattacagaaattttgaaacatgtacaaaactagaaagaatagtataatgaatcctcatgtaccacccattacccggcttcaaaaatcaaaaacccatgaccagttttgtttcatctgtgctggtagccattttcccctgccactagattattttggagtaaattctagacatcattttatcagtaattacttcagcatgttttttttgtttttgtttttgtttttgtttttgtttttgcaatgtcgcctgtcacccaggctggagtgcagtggtacgatcttggctcactgctacctccacctccctggttcaagcagttctcctgtctcagcctcccaggcaggtgggactacaggcacacgccaccatgcccagctaatttttttatttttagtagagacagggtttcaccatattaggctggtctcgaactcctgacctcaggtgatctacctgccttggcctcccaaagtgttgagattacaggcgtgagctaccgtgcccagcctagcatgtacttttaagagaataaggactccttttaaaaatataaccacactatcacacataaaataattaataatcctttattattagcagtggtctccatttaactcataagttatttttttagttctagtcagatccaaacaaggacctcacattaccatactgctttttcttgactcatcagttttttgtttgtttttgagacagtctcgctctattgcccaggctggagtgcagtggcaccatctcagctcactgcaacctccacctcccaaggttcaagtagttctcctgcctcagcctcccaagtagctgggattacaggcatgcgccaccatgcctggctaatttttgtatttttatttttgagacggaggctggccgtcacccacgctggagtgcaatggcatgatctcggctcactgcaacttctgcatcctgggttcaaacgatgctcctgcctctgcctccggagtagctgagattacaggcacctgccaccacgcccagccaatttttgtatttttagtagagatggggttttgccatgttggccaggctggtctcaaactcctgtcatgcagctggttttgatcagacatcctgtcatgctttatttggccattcacaatcaataataaaagacttctttaaggggataggtctcagttcatctgtttgtcccataggcctctgccctgcctgggaagctgctgggtactggaagggtactaaggtactaagtggaagatgctttagggcacatgagcaggagcagcagttagactgagggcccttcacgtgttagcataaggaggccagtctcttactagaagccctcgatcaatcctaggcagttcattcaatttatttaaagaggcctcctgtctttggctgtggttctgcagagcttttgggccctctgtgtgctgcaggtatgggatagaggagctggctggcacaggaccttcagtggatcccttaattttttggcccttctgaatcttctcgacgcctgctgtcttcaggttcagagcctccctggggtcccacaccattccttgtctctcatttccaatggtgctttcttgtccttgtgctccaaacttcagcttctgttgtcatacctctctgaactttttctatcttccggaaattatttgaaatgaaatcccttgttctctaatgatccttccttcagcaaaaaggcccaatttgtagttcagaagacgtggtgctttttacaaaaagtatgttaatgttttaccatagactggactaagtagagtgtgtgtgtgtgtgtgtgtgtgtgtgtgtgtgtgtgtgtgtttagaaaatatttattgagtttcctattttatgccaggcactcttctaggcacttgggatagatgtattcagtgaaccaaggagacatactgttgactttgtggagcttacagtctggtggggaaacacatggaacgtgtacttataaatatgttaagggttataagaagagacataggagtaccatgagaccagtacagcagggggagctaacgtggctcagagaaaagggcgccctagggaagtgatatttaatctgaaatctgatggctgagtaggagttaaccaaaataagagggaagagcccttcaaatttgtatgtcaaagtgcagtagcaagtgagagtctgagaccaatagagagtagcaagtgagagcctcaaaccttctcctgttggagcaccaggctgtactacctcaggatagtcccttgccttctctggatctggcattcctcacccctaaaatgaggagaccacatgctcctttcagctgcaaaaatcaatgagtccaagactgtttaaagttaaggtcactgtttaagtgaaggtccatctctcccaaaacagctgtagttggaaacttatctcaagctggtgggaagtggtttgaaaaaaggcagggaggggacagtgtgatatcctgcgaacctatccagtttctagccacataatcactggggtcaggcttctcttctccttctggctctccttcagacacaccaaatcagcagtccaaaggggaccacaaagtggatcctcaggacatcgaaccctgaagaaaaagcagccacgtgtactccaaaaccaaaaaaatacgttgagcaatgtcttagtcatcttttgtgggtttgattccccatcccccaaaaatgacttaagtttctgatttcaaaacattgtgtgtatgtgtgtgtggttttttttttgagacagattatcattctgtcacccaggctggaatgctgtggcatgatctcatctcactgcaacctctgcctcccaggttcaagcaattctcctgcctcagcctcccgagtagctgggagcctcctgagtagctgggactacaggtgtgcaccaccacgcccagctaatttttttgtgttttttttagtagagacagggtttcaccatgttggccaggctggtctcgaactcctgacctcaagtgacctgctcgcctcagcctcccaaagtgctgggattacaagcgtcagccaccgtgcttgaccaagaacattgttttaagtgtaagtgtggttccttctctggggccttacaccaggattgtggtgagacgatgtattgttctcctttcttttttcctgttcttctgtattttcttatctttttacaataagcaattatgattataattggaagaaaacaaaatctacttttattcgtaaatctcaatcaatatacttctcaattaattgtctagaaaaagcatggaccttctaactgcatggcacagtgaataagtgagttggaaatggtatgacagctgaaacctgcctttgatgggtgatgagcgattgcactgtacagcagctgtgtggactagaaagtgggtagtggtggccagaatttctttattcatatactccttcaacagatatccgtcagttgctagctgatatagtttggatgtctaactatattggtggatagctgttggatgtcatgttgaaatgtgaaccccagtgttggaagtgggccctggtgggaggtgtgtgggttatgcgtacagatctctcatgaatggcgtgatcccctccctgctgtaatgagtgagttcttgttcggttagttcaagtgagaactggttattttttaattaaaaaaaattattttggccgggcatggtggctcatgcctgtaatcccagcactttgggaggccaaggtgggcggatcacgaggtcgggagatcgagaccatcctggttaacacggtgaaaccccatctctactaagcatacaaaaaaattagccgggcatggtggtgggcgcctgtagtcccagttactcgggaggctgaggcaggagaatggcgtgaacctgggaggcggagcttgcagtgagccgagattgcaccactgtactccagcctgagactccatctcaaaaaaaaaaaaaaaaaaaatgcaagggactacatgtgtgcaccaccatgcccagctaatttttgtatttttagtagagacggtgtttcaccatgttggccaggctgtcttgaactcctgacctcaggtgatctgcctgccttggcctcccaaagtgctgggattacaggcgtcagccactgtgcctggccctggttgtttaaaaagaacctggcacttctccctctcacacttgctctccatcttgccatgcaacattccggctctcctttccctctaccatgtctaaaagcttcctaaggcctcaccagaagcagatgctagtgccatgcttcttatacagtctgcagaactgtgagccaaataaacctcttttcatcataaattattcagcctcaggtattcctttatagcagtgcaaacggactaacactgcgtaacaaattaatcaatctgtgcctgtgattttctcatgtgtcaagcagggataataattatacctacctcatagagatccttatggggttaaatgaggtaatttatataaagcagttagaatacaaccaggcacggtggctcacacctgtaatcccaacactttgggaggccaaggcaggcagatcacttgagctcaggagttcaaaaccagcctgggcgtatggtgagacccccgtctctacaacataaataaataaaataaacagaatattacctggcatatggtaaatatacaataatagttttggggtttgtttatggatttccttattttaataagtatctcataatatgtacaaaatgctgctatattagacacagatcttttccttaaaaagttaggattctggcagagaaaaaagacctgcccccaactaaatatgtgtcatcagagaaaagggtatgtttcttaagagagaaacagagcatactaaggaaattcagaggaaggagagaccccttctaaactgggggtaaaaggtggaattaaacagccaaagtttccttcatcctcaaatggagctgatgctgctgtctgtgaaaaacagccaagtttcctgaagggaagccctttaagaggtggtagtgcaagggggttgtggattcaggactggcaccacatggtccctagttagagtgcaggctctgccccttgctcccgtgagcctttgagcaggttggtcggctcaccatgcatctgttgctacagctgtaagatgtgaatattaataatgtctcctgcacccgattattgtgaggatgacatgaagtggtgttcatagagtgctcagtgcacagcttggccccagcccacataagtgtgtccagtattgtcagttataagaagaaatgaatgtgccagtgttgctatggttctgtcttccgggattctgtcacagacgtagaattattccgttcacaagggaagtgatacagagtacatgttgttgaagaaaatgatgttgtttttatgaatgggctccttactattatttttgttcaagtaacaaaacatgattcaaagcacccatcttcaagagcccagcctcatttcctgacacctactcagtcttctggaataaaggctcagccaaacaatagccctgacctccagtccctccaaactgagtgttgctgctgagaacaggccttacagctctgggtgggcttttgttcattactcatcgtgacattctggagaaatacaggacccttttgacttcccgaccaatctctgactttctttcattgtcacatcaccattagggcaaaggatgatgaaatggtcagaattagacaagaagtattcaaatatttttcaatgtatagtatgtgccaggcacataacccacacaagaaccttggagagtaaggctgttattcttctcattttacactgggaaaccaaagcacagcaagaaggtctagggaccagaaggaagcccacatctctctgagctgtgaacggctgctctctgtgggttaccaggctggtgtttttttgttttgttttgttttttgttttttgttttttttttaaagacagagtctcactgtcgcccaagctggagtgcagtggtgcaatctcggctcactgcaacctccatctcctgggttcaagcaattcttctgtctcagcctcccaagtagctgggactacaggaacacgccaccacgcctgactaattttttttgtattttagtagagatggagtttcaccgtgttgcccaagctggtctcaaactcctgagctcaggcaatccacccacctcggcctcccaaagtgctaggattacaggtgtgagccaccgcgcccggccaggctggtgtggtttttattccacagcagtcctacgtcacattgtcacattgttgaaaagccttcagattgacaaactccctcctaatatagcctgttttcttggatgttttctgataagcatctgtgttttctgagaactaataaaaattcttgttaaaccacaaattaccacagcctcttccttacctatagagagccgctttcccagtaaagctccggtcctaccttcccatcaccatcaaagtggcattgaaacagatcagatctgctccttttgagggagttagttgaagcccagtcttgcttcaggccacacaggatttgggtagcaaagcaaggaaagcagcctctctgacctagtggcctgagtgtttcctttcccaggctggctgcggcaaccactttgagaaatggcattggcattggcatgtgtgtggcatgtgtgctgacctagttaggagttgaggcttcatttctaattctgtccctttcgttttgagctgtgtgaccttgggcatgtcacctaacttctctgtatatgtcttcttatccaggaaggagagattaataatgtagcctcatagcacttatctgattctcctaaggatgttatgagaatcaaatgagattatgtacaacgagagcaaacatttattcaatacttagtatgtaccaaatactttcagtttccttacatgtgttttttaattctcacaatcctaaaacagaggcactagtatcccacttgacagttaaaaaaactgaagttcagagaaattaagtcagacaggactcagatccacatctgtggctcccaaatgatgttcctaaccactatgcatgtcactcgctccccattgtacacgaaagtagagagatgttctttgtctttaccatcaagcactctccaaatgcaagaaatgatctctcgtaaccactgctgttccatgttggtccctaaggacacttatagcctgttacttgtttgtcttatcttgtagtttatgctgctgcttttcatgtccctaaggacttgttcagtgaattcttttggttttactcccagagaatctgttcatctccttcataaagggggttaaaggtgcccagctgagcctggcatcttgggcagtggcctctgacttctccagggttcttccttccctcaagcatgtagttgggtagcttgtagtaaaatgctctataatgcatttgtttataagttccccagtcactgatttttactcattgaatctcagaagtggaaagcaccaaagccagcattttgttgatagggaaactgaggtccagagagggatgtgacttgcttgaggtcattcattcagttgaaggcctgaccaagactggaacccagtttcccaggggacacaccagtgctgtttccaagccttccccgggggcacacatcacctcccctacatgaaggacaaactcatgtactgtgcccagcatgtacctaggagacctgggagaaatgaaacaacttggaaaattgggcaggaagaaagagatgggtgtggggtggggtgaagatctccaccctaactagtatattatataccaaagaaaggaattaaacacacaggaaagcagacaacccactaagaagcaaaggaatttacccaggaaccctggctcagtgagtggataggaagccttttgtcactaaagctgcagggttgaaaattgaaggaaggatattaggcaagcgtggtggcctgggatgcagttacagccccctggctcattgtccaaaggaaatggatctctcctgtggacagagaggtggaaactgagtgagtgagttgtgtggttgacatcatcaggctgagcattggattacaacaaatggggacttacttggcccgagacatgggaaacacccactaaaacctcaaagtgcttttcatttaggagacacggggaagagacagagaggagggtaaagtgagaatcctgcccgcaccacaggtctggactgctaaccttgaatcctggtttcttaaattctgcctccgcttctgactgaggaccactggattttgaggaaactttggtcttgtaagtagaactttactctcctcccctgcccaacacccccagggagaagcagagcttggaggcagagctctctggagagcttgctttccagcctgttggccacaaaatgtctatttttatataatgatatatgtgagcttgctctgaaaattatggccttgtctgaaactgcctaaggctagtcggagcctccagtctcacaaatgggctccattcagatgctgtttcatttttactcaaagaactttgacagagtattcagagctttaaaagcagctccttgctccaaatataggtgaagaaataaatcttccctaagaaattcgtgtttgtaaaaccctttctttttttctgattacaaaggtggtataataatttttaaacattctagaaagaaaagtctccgaaagtagtgaaaattccctattatcttccccctcaggaacatggttgttgtgttaaatttcagttacagatatggtcagactccatgaatttaccacatataaacccagtgctgcagcagctgtgtggaaaactccaagatggaaaggggttggaaatctttaaccttgggtttgcgatctttttattgcttccttttaaaaatttgctgtttatgcctggaatataaacaggacatgtaagcctttaggcattttatttgttggtatctgttttcagggtttgaaactaagcaagctactctgtagagagggaaagagggggcccttgctgtacccaggtcccttacttggtgggtccctgaactgaggaggattcctaggtggcttgagatggcttgcagtgtgctaacaggggaggtgtcccctcttagcaggttaagtatatttgaaaagttacagctaacgggaagatttcagcttcaacaaaaagctaccatatattagaagggtcacccaaggaaactgtcaccttgggcaagtgtttcacactctctgggtcttgtttctttatttgtacctaatgaggggacaaaactagatgatctctgtatttccaaattcagtatgaaatgaactgtccatatttcttttccctttgtattgggcccttatggctttaggagcaaaggaccctaggttttcagtttcccagagtagctaaaaacgggtgcctgtaggacagttaaaagaagacataaaacaggcaacattaagttacttctgagtttttatgggtctttttcagattaggtgttcttgaagaaagagaaagaaaaagtctcagtggtaactgtatgtgcacacgcatacactagcacatacacttggggagagaggaaagaaggaattggcattattgagtatctcttaagcactaggccctatgttatgctcaaccctttacagagcactagatggtcagtattattccctaaccccattgactgaggacaaccatctacttatatgttttcatattatcctgaactaaactgtatttacataattactggcataacttcaattccccatgtctccactagaccatctgcaccttctctgcgtgtctgtctagcccatcactatgccccactgcctagtagaaagcctggcacataggtacaaaggagacacaacttaatttaaacttaaagcccgccatcctagttcctcatttggcaagaaagagggagaagaagggggaaaatccctctatttgcccctctttcatcatttaacatagagccaccctctcctgccacaagggaaggatagccacagccagagtgcaaaaaaaaaaaaaaaaaagcaaaagacgtcagatcttgaattttgagtttccaaggtgccgggtcttgacaaattaaggtttttgctttgttttgttttgtttttgtttgtttgttttgttttctttaagggcatcagagaccctaatcctcaggaagttgtggtatttagaaactatttgtttgaattaaggtcctagttaataagagggttctcaaaggcccttggcacttctttttttttttttttgagacggagtctcactctgtctcccaggctggagtgcaatggtgcagtcttggctcactgcagcttccacctcccgtttttgttcaagggattctcctgcctcagcccctcgaatagctgggattacaggcgcctgccaccacgcccagctaatttttgtatttttagtagagatggggtctcttggcacttctaaagctgcagtcttccccagcatttcatcccatgaaggtggactgttgctgccatggacccacccatgggcatgggcagtgggaaggccagggcatcctctgcttcatcccagccccgctgggatcttgagatttggggtaatcaaaaaaggcatcctttttcctaaggtggtggtgaggaggtgatgttctggaaggaaggtacctagactttgtggtccctgccaggaagtggagagtggaaatgtggaatgcctcacactcctcaactaggtaggccttcatgtaccagatgagggtggctttcagttcttgttttgtgtgtcaaagttgctcctgttatcagtgtgtgtttgctgatctctcccacctcagtcactcccggcagtgagtttagggcatcttgggagtggaggtaggttgtggaaaagatgtgtccagagatctcatttggctttggtatcttcctgaaataaatgtcacacacagggctgggcatcttgcatatgctgacttctcttaatcttcacagcaatgatgtgaggcagagatcatctccattttacacctaagaaaggcacagagaggtgcagtggattgcccagagtctcacagctggcaggggctagagcttgagttcccaatgagaactggttgtccccgaagcccttgaatatttcaccatactgcagtgcctttttcatatcacctccctggatctcagttgctccatctgttaaatgatgacaagtgaactctagtcagaagtcagagtggtgttttgtttttaatttgaatgcctttaggcaggtgtgttctccagttcattaccatttgcgcattcccctgtgccctctagtctcctgcctggcccctggcccctgtgggaatttgcagccctgcatctggttggtgtctaccgtttctttcgatttagacaatctagagggcagtgagaaattggaaaggggtagcaggtaagagctctcgagttcagtgagaaattggaaaggaatagcaggtaagagctctagagttcagtgacaaattggaaagagatagcaggtgagagctcttgagttcagtgagaaattggaaagggacagcaggtgagagctctcgagttcagtgagaaattggaaggggatagcaggtaagagctctgctttcaccgcctcctagctgggagatcctggactgatcacctcactttatagaacctacttctctttctgtcaagtggggggtcacagtcatactgacctcaaaggggtgccatgcggatgaaatgagatagggctcataaagcacttagttagtacaaaaatacatgcttaggattagctgctctcaatttccagaaagagaatgtcagccaatgtacacaggcatctgccccctcagacataggatggcatttgcatgaggaaccagaagttatctttgaactcatcattttgaaacccctgtgatgaaccctggagctgccatgttggctcttcaaaccaagcctcagcattatttcctgtcacccagtcaagtgatgctgaacctcaaatcagccagccagtgctgaggccaaaagcagaagtgggtgctattctcttgggaccagaggaccctagcccagccacttaaggaagaagctggtaacaggtgctggctgtgacagacaagaagctgaactggcccaattaactctgccaaatgctttcacgaggggccagaagcaattcctaagtggagactgaggtggaaaatctaaagttctgggaaacaggttattaatcatgaccctaggctgagctcactacctcctggaaatccttcagaaatgtcttaggaaaacttggagtactgctccttcaaagagtggtttctttggaagttgccgtgggctcctatgctgactgattatgaattgcagattagaacacataatgtatccgctcttactggaggaagctgcatttccaaaaagaagtctctttaatgtttcaagaaattacaggctttagcttgactcttcagaactgaataatggcccttcatggcaccgaagaaagtatttggtgtattcttactatgtcccaggaacctaggtcagttactgttttagtactttatcagtgtagtctttaacattccataaatgtacattgaggacctgttagtactaagcactgaactagaggaccagggtaaagacactgcctctggtcttgtggaattctctgtgcaacaagggaagatagacagaggagtgaataattttaatggcacgtgaaaagtactgcaaaagaaatatgcacaagtgctacaaaacaccagacactggatcagcatattgtggaggtcctgatcttgcgctgggttgattccttctgctctctccctacaattcctggctctgggagctttgccagcatttgcattagggagcaactgagagctgcccctgctgaagcactcatttctggcaccttcctatcccccgtggcttcagaggggtggaaagaacacttccttacaaaatgtatgggccccacctgagagggccctgaatctgaagtccaaagttgtagtaaggaaacagagggacgggtgacttttgtagtctaaaatcaccactgattttccgttggtttgtttttataacatttattgtggattttttttttctgattgcaaaattagaatatgttcaagggaagaaaagctagatagtacagaaaaacacacttaaaataaatcatcactcagtgatttcacttctctgtttttgaataagggcctgtctcccaatccccccacccacataccgctgtatttcaagtttagctctaattttaatttctccctgggcaaagtctcatgtttgtttgcatatctcaaaggtgcttgtgttgtgggctccaatcactactatctgcaattggttagagcctgcggccatcatttatactttcctggacgtgtgtgtagattcatctactgctaagaaccctttatgtgttaggcattatgcaaggtgcggtggggaatgtcgaggtaaataagactttgaggttgctcatggccggataggaaaaaaagactcagataacatgaacacattgtgaaaatgtgccccaagatggggacagagtcctgtagaaagcctaagagattggaggagcagtagcatttgagctgagccttcaataaatttttcatgtatttagccaatatttgttgagaacctaatatccgccaggcactgggcaaggtgataggtggatgatgttaaatataacaggcatggcctttacctgcatgaagtttacaagcacaaatggtggcgttaagaagtcaataagcagggggagtgaaagaggagagtgtggctggggtcttccttgaaaaggtggtattcaaactgagaagagggctgggcgcggtggctcatgcctgtaatcccaacactttgggaggccaaggcgagtggatcacctgaggtcagtatttcaagatcagcctggccaacatggtgaaaccccgtctgtactaaaaaaatacaaaaattagccgggcgcggtggcacgcacctgcagtcccagctacttgggaggctgaggcggaagaattgcttaaacttgggaggcagaggttgcagtgagctgagattgtgccattgcactccagcctgggtgacagagtgagactttcaaaaaaaaaaaaagaaatggagtcacttataccaagagtaaaggagggagagggagtaaagaagggtgctggattattccttcctttgctcattattgattctaaaaatctcacttattttctgtattcagtttcctttctattggagaatattcttggggtctgtgaatggtaaacttgcccagtctttgtttgaaaatatcttttgccctcacacttgatatgttagctagatatagaattttttgcatagcatgtgtaatgaatgtgaaagttatacatgcctctttaaaagttttcaatcaaaacagaaatagataatgtacaaagtgaaagtctttcatttcttttctcacaatttctcaaaagagaataatttttttcaaaagagagaagtttcccagggggaaccattggttacagtttgcccttttctatatatactgaaaattgtttaaagtgtaaagtatgtatactttttaaaaatgtgcacgtacacaaatgctgtactttttttttttctaaacataaataatcatgttcacatttgagcaggacacagtagttcacacctgtaatctcaactagtcaggtggctgagagtggatgattgcttgaggccaggagtttgaggctacattgagctatgattgcaccagtacactccagcctggggacagagtgagacctggtctcttaaaattaaaaagaaaatgtaaagttctttttttaattaaaaaatgataatatatgcaattttacaatatgctttttaacaatcaagcatgtacttttttccacatcagtacaatgaaatctccttcattctttgaagttgctgtatagtttctcatgatattgatacaccataatttaactatttttctattaatagacatttaagttgttttcgccccttggttttgctactatacagtatttcactgagtatctttttacttaggtaaatatatctgtagtataaattcctggacatttcaggaatgtgacgtgtctaggaatttgaccccaaaggatatgtatgcacatttaacaagttaatagatattgtcaacttgtcttcccaaaagattgtttcaatttataatcccagagtatgtctggctctaatttttgtttttcttctggttccttagaattcccgtactgattagtcaacagtggaaaatctgaagagatgcaagcaggaaaaagaaattaaaccaggtaggtagtggcactgttcatactctactgccagagcagcacacgtttttgcctgaatatctttatttctggttgaaggaagaaaatacgtaagttccaaactaaattagtgggagattttgaccttatgaagaaaaggcaggatggctcttttcagaagttatatacataacagcatgctacaatttcacagtcaagattctgttttcaggcgttttttttttaatagcatcagaaagaaaatttacctttggtggcttaagaggggatgggtttcccggccatgtacttaagcttaagcaggtggaatcatacacaggagttattagcaacattgggcctggtgccagctttcctctccaccaagtgtttgctgtaaagctgttttcacaaagaccagggcacattatgggaattttcattttaatgctgtaatagaggagcaaaagccagcaaaacccaacccaaagaaatgggttcggcccagtagtctggtgagaagggatgaagatgcagtccctccagctgagaacaaattgccattcaaagagcacaagtggcccacctggcagtatggccaccttgggtccagtgtccatagtttatgatatctaaatgtttctggcataagttaataattttaaactcagggtaacataataatcgactttttacctaaagcagcagtatttatcaacaaatctggtgaatttctttgaattgtcaagttggaagtactgggtccacagagatcttttcacccaccaggcatccatcagcatccatggatgtggttgttaaggtatcagaattgaaggctattctagattggcctacacccacctggaccttctccatagctggaattttcacaaagaggctaaagagcctggggatgagcgcatcgctctgaagagcttgccgaatccactgtgcatctgtccataagctaaggatggtgtgaggactgaaagctgcatgggagagagaaggtcttgtgattttctctctcttcagcactgtagggggcacattgcagctgtgtctggtgcagctcagtttagactcctgcctcagccaggaaaagtttttttcatttttacattaatttagcaggtatttatggagcatcttctataaattggacaccagataacaaagcaaaagtggcacagtccttgccctcaggaagcttgtgggtctggctgacagtagactagtagcagtagtctgcggtaggtccagagggctagtgggcagagggtgctgcggcttgaaaggtatgcaggagatgacttggagaagagtgggcggggacaggctgggggcttgcggagcagcacagcgaaggcctggaggcttggggggtgcagcactccatggaaattccatgggccaaacacagtgcagagggggttccctggctggagttgagtctggaggtgtccatgaatgaatctgaactttatcctgatggctctgaatggaaagtcgctggagggctttaagcaggggagagttgtgagtcaggcttaggaaggagactgtctagcttcagtttgggtaagggactgagagagttctaagggactgagagagttccgcactctgcctggcccactctcatcacctctcttcttagcgcctgtgctcctccttcccttggaacttcaagaaggcaaaggacagagcccgaagtctgagataagatagactccttggggagaaaagaggaagtggtgctgggtgggtgggtgggggcacccagtgtaaagcagagtgtacaggttgccttggacaagtcacttcacacctatgagcttcagcttccttatctattaaatgaagataataagtattactcttcttttctctcatctcatgagatatcatcatgatatcttaaaatatcatggatattttacatgcccagctagggcttccagagaaatctctctgtttcgtttgccatgtaaggatttgttgaaatcctcaagcgcacattaagtgcatcctgtcgctgcagcttatcgcctgggatgagagcagtgaagaagccctagcctcaggatcagtctcacagctccctctccctgcagccaagaaggaccggtctacagaggggagggagcaaacactgaccgaaggccaggtgtgtgcttggcaccacccacagacaaaagagtgcttgggcagagctgctagaactattatttaagccatgtgccagatgtgataagcacttacatccttctcagcctcatttagtttgatcttatgaagtacatatatattatctccatttgatagatgaggaaaccgagactcaaagaggtggaactgcttgctggtagtgacacaattgggaagaaggagaagggccggagtctggagttcgtgctctctgacttctgtgggtagcatctgccattctgctggtgctccttcagacctttcagacagtgcagaggacacagaggaatcaagggacagctgttctcttacaaaccttgaaaatcctgtacagagccctcagataaccaaaacgtggtccagaactgaatcctggggccaacatgcccatttagcacttctctcaatcagtccttttccccaggtgcattaaacagggcagctgccttcccaccctatgggcaaactgcttggcagctaggagtgtgcctgctcatctcccaggctgctttcctttgcacctcagcaaggagggcaggccgtgcatccagggaagcacatagttactccttctgccagaaggccaccccctaatctggtttaccgtggacactgaagtcactccctgtctcctggccatgaggaaaactcctttgagaggagcctctgaagccagtggagagagtaaaaagtgagaatcctgcctagttgaacaggcagttcagcctgttctggaaagagttaaggctgtgtccataccaagccatttaaagaatctgcccagtagaatcaatattgtcaaaatgtccatactacccaaagcgatctacagaattaattccattcctatcaaaattccagtggcattgcttacagaaatagaacaaataatcctaaaattcctatgaaaccatgaaagaccccaaattactaaggcaatcttgagcaagaagatctaagttggaggcatcacacaacctgatttcaaatattataggctggacatggtgactcacacctgtaattccagcactttgggaggctgaggcgggagttcgagaccaacctgggcaacatagcgaaaccctgtttctataaaagaaaaaaaaaaaatccaaaaagtagctgggcatggtggcgtgcacctgtagtcccagctactcaggaggccaaggtgggaggatcacttgagcccaggcatcgcatcaaggctgcagtgagccgtagtcatgccactgtactccagcctggctgaaagagtgagattatgtctcaaaaaaaaaaattataatgctataataatcaacacacacacacacacacacacacacacacacacacacacacacacacgactattactcagccttaaaaaagaaaatcctgacatttgcaaaaacatggttgaacctggaggacattgtgctaagtgaaatagggcagacacagaaagacaaatactacaggatctcagttatatgtggaatctaaaagagttgaactaagagagagtagaagggtggtttccagagagagtagaagggttgttggggaaatggagagatgttgagcaaaggttacaaacttgcagttataagatgaataaattttggcgacctaatgtacagcatggtaattacagttaataatatggtattgtatacttgaaatttgctaagagagtagatcttaagtattctcgtcacaaaaagtaactgtgtgaggtggtggatatgttaattagcttgattgtgataatcatgtcacagtgtgaatatataacatttttatttgtcattcataccttaataaaactgaaaaaaatttaaagaatctgcccaggtcacaggaagccatcagtcataccctgagctgttgtgtaagctcaaagagtatggtttatagcatatggatgagtgctcttgtgccaacgctgggctaaacctttacatccagtgtctaattaggtagtttctgttattatccatgttttaccaaggaggaaactgaggcttttggagattacatcatttggccaatgtaccagagctggaaagttgcataactaagatttcacttgagctttttttagctccacatcttctattttttcagctacaccaaaacgacttctttaatttagctttgcttttctgataatagtaaccaccaccctttattgagcatcttgtcatgtgagccaggcattatacatccattatttccaatcccagtagaaccttacaagtaaagtatcattgtccccgtttcacagatgaagaacctgaggttcagagaggtcaggaattttgcctcacagatttcatctgagactagagtgagctctcaactatcatcctgtacttccttcattccttaccttttcaggttcctaggaggaaaggactcaaaaaaattatgcatgaatttcctttaatttcacaacaaccctaagggttgggggttgatatctctgttttacaaaagaagaaactgaggctcagagatgttaagtgatttgctcagcgtcatgcagctagcaattggtggagccccgattcatacaggctctgacccatagcttaagcttacttgcctcccccattcccacccctcacccctcttcggctctgtctccttgcaatgggggcagaaaatccagcctttatttctccaggtcctagtagtcctgggagtctgggggatttccagctcctttgaattcccttttttggcctctactctgcctccagcacctctcttaagagtccttttcactgttgtcatagcaagggtctcatctggagggaagctgccttgaggttggaactatttggctgcttatcagcaaggcttcagggccttgccatagcaactttccaagccacccatcttgtgacctgttctgactcagggcccctgggaatcccctgggtgcagatgtttgcagtgactaggatgcagcagtcggctcccaggactctttttctggccaaggccattttaggaaggcttctgttccagctgtgctgggagagttgaggtccagagcctccaaaccttaagaatgcagggttatgtgatgtctagagctggagtttttagccaggggcttatgggttaagagccccctgtgatcataggtatggttacacacacacgcagagaatatatacttttctgggcaaagtatctgtagcttccctcaaactctcaaatgtgtctgtgacccttaaagtttaagaacactggtctagagagaacccaaagtgttgtgggccactgtgctcccttggccaccagcctctcagatgccagaatcttgagagagcacaccaggcctctagtgtttctgcttaggcatgaactgggatacagtatcaaatattgctgaagttcacaattataactataaatgtacagctgtcctttgggatgccccaagtacttttatttatttatttatttttttgagatggagtttcgctgtgttgcccaggcaggggtgcagtggcatgatcttggctcactgcaacctccgcctcctgggttcaagcaattcttctgtctcagcctcctgagtagctgggatcacaggcgtgcaccaccatgcccggctaatttttgtatttttagtagagatggggttttaccatgttggtaaagctggtctcgaactcctgacctcgtgatccgccagccttggcctcccaaagtgctgggattacaggtgtgaaccactgcgcctggtgcccctggtgctgtaaaagtacaactgtcctgtggatgccccaagtacaaccacgaaaatgcatgcccagcaccccaaacatgtcaacatgtttgaacatagtatattcaccccataagtggtagccaattttttattttattaaatattaaataaattaattttaaacacatttttgttttgttttactcttatcattgttattatttatttggtcaggagccaggaatcagatggttatttagtcactgagtgattaaaatctatatgtcaggagctgtgctatatttcaaagatacagtgacaaacaagaaaggcagggtacctaccctcttggaatcagttggaatggcagataatgaacaaatgtatcagcatcatgcctggctcacgggacatttctgtgtgtatttgtcgaatgactgttgaatgaatttcgactgagtcattattaggaagaagtcaaggtgctgcaggtggcaggcaaggaaacttcatctcttctggtgggtcagggaagaggaagagggactcaggctaaagggcctacgccccaggctgccaggaattacacaggactgtttacagggggctggcattcccatgaagactggaggtgtggggggagggctggaatactgaacaaccaagggcttaggaaccttgagtaaatgatgttaatgtgggccagaggtacggatgacatctacactctgctcaagtagtgatggtccctggcttgcaaacatgttgctcttccaggttccaagggaggctgttgttcaaccggtatttacctatgtagcaagttctgggttcggaaccctacttctctcaggaggcaggaaggatggaaggacatccctcctgcagctgaagacggcagagccccagccactgctggcagtggccgtggacacacagtgcagtgtctgagcagtgtgtgaagagactcccttactgtctgaagggcttcactcaccctacactagtgagaagcctctgaatattgtcttggaagggaagcattcacatattaagggtaaaatcaaagtcagagcaaaatttaaagtctgctctttgcccctcaagaccctgaaagtccccagtgactgtcattccactcacctcctctcccattcactgctccccagccccatggcctcttattagtctttctgggcagcaggctccccttgcctcttgcatgctgtgccctctgcctcgcatacttagatgtatatgcagaagtggtttctaaactcctctctctcatcatgtgtgtgggctgtgatacccaaccatcagtaacagcagctgatgaggacagtgatcattagctagagagcacaccctcagtcgctccacccagcattattagaataataataattccccaccaggtccccccacccggcattattagaataataataatcccccaccagatccccccacctggctttattagaattactatgagaaactatcctctagtgattctgttaattgtgatttttgcccccctactaccactggttaagaattacgggcttatgaactgagctccctaactagaccatggacttccctcaggggcacaatggtatcttactgtttttgtatctgtggtatctagtcccaagcctagtatacactgagggatcagtgaaatttttctgaaggaatggatgaatactatagagataatatcttgcttcttttcattctccacggtgtattttggagatgcattttatagaattagaggaactagaattgacacaaactgtcttcaacccatgaaagtctgtgcttccatgaaggtctctggaaagcagcagaacagtccatctggatcactgcttggtggctgggcatgctgggtcctccccgggcctcctgctgcggatgtatgatctaaatttgccgaggctcagctacacagcaaggttctcagagagtggcagtctccatcctactgtgaaaggaggggcagttttccaaggacttccttgctttcctgcccttccttcagagctagaagactcttacctcccttaccccagagctagaagtaacattagagattgcttcagttatccacttctgcataatccatcacccctgttactcagtggtttaaaacaacagcaatagtttcttatatctcatggtttctgtgggtcaggaatttgggaacagcttggctgggcagttctggcttggatcttttatgcagttgcagttagatggtggctggaactggagcagcttggggccagcaccgctgaaggctggccggctgctgctctttcctggccgtctcaggacctctcccctgtggttacttcatagggcctgtttgggcttcctcacagcacggccacctcagatttcccatatgcagctcaatgctctagaggcaggtttccccagagagagctaggtgaaagctgtataaccctttatagcctcatcttggaggtgacacaaaatcatttttgttgcattctatttgttagaggtcattaaggccagctcgttcggggaaattgaaattaaactctacctcccgagaggaggaatgtcagataatttgcagacatgtttcagaaccaccacagagatacccagtttcccccttcattccacacttgagactcccgaggtttgaggggaagagccttgtccagaggtgcccagcctggcatgggcagacctggagtgtgacccagcccctaggcctttggcaggcctgccaggaagtgatctcactttcccttccttcctgtcccctcacagtaagatagagactgccactctctgggaaccttgctgtgtagctgagcctcagcaagtttgataatacagacacagcaggaggcctggggaggacccagcatgcccggccaccaagcagtgatgcagctggactgttccgcagctttccagagacctccatggaagcacagacttccatgggttgaagagagtttgtgtcacaattccagtccctagccctggccctgtgtgaagtagtaacaccgccctgccagtaggatatagctgctgaggaggtaagagttttaaaaaattcataccccaaaataattatttttactcttgctgtgaagttagataccaaagagtagaatgtggtggtagaatcaagagagtcaacccaacatcactgaaaagattctgaaggtttgtatccagctgaatatccaaaacaggatgttgcttaagcatgggtaaaatgcatctggtgtatgttttagacagccttgtactatgttttccagggacttgcttactttcttgcccttccttaagaaatgccttattatgaagctgggggcaggggaaaaagaaggtcagaaaagggaatgggtacttttcagtaaatccatactacatgccaggcataatactaattcactcccctgctttatagcctaatagcacaggctccatctggctccaagctccctaaccttgctgagtttcagctgcctcttttgtactatgggataatgatactttctgtcatagagttgctataaaattaaatgcttgtaagatgcttagcacagtctggcatgcagtaagaaagaactgtgtaacaggccaggcaccgtggctcaagcctgcagtcccagcactttaggaggctgaggcgggcggatcacaaggtcaagagatcgagaccatcctggccaacatggtgaaaccctgtctctactaaaagtacaaaaattagctgggcatggtggcgcacacctatagtcccagctacttgggaggctgaggcaggagaatcgcttgaacctgggaggcagaggttgcagtgagccaagatcgcgccgctgcactccagcctagtcacagagcgagattctgtctcaaaaaaacaaaaaacaaaaaacaaaaaaactgtataactgttggctccaattaatccccacagccactttttaagacaagtgtgagccctcccattttatagaaggggtgtctgcagttaggtgaggtgcccagcatcatgtgccactgtagggacagcagctgagactctgaagtccttgtggcatccaccacaccacattaccctccgggcagctctgccagggctttcctgacatgcaatagttgggggcagaggaactcaggaggctttgtgccctacaggagccccatgtcaggtcctagagcaagaacatttgaaaaaccaaggccaggaatccatttatccacttaggaggctctatagggagcagggttacagagaatgttgtacacagaggaaatagtctagtaaaggctttgaggtcaggaattaaatgaggtttgaggatttaaagagaggcccagtgtgaccagagcaaaatggaccaagaagagagtagaaatgagacaaaggctcatctgcagaggcaggcagggccaggtcaatgcagggcttcagggactggcatcaggagagtggatttcactagatgtgaaatagaaaagcatcagaagttgaacgaagcagggaaattccagtgatccaatttccattttgagaacgttaccctgcctgccatataaaaaatagaccctgggctaggggtgagagagacacaggactctggtcagggtctctgctcagagtcctggtgagacattccggagcctgggtggtgcatgtggaggagagaggtcagcagattcaagctctgttttgcaggtagaaacaaaaggaccaggctgggcactgttgctcatgcctgtaatcccagctctttgggaggccaaggtgggaggattgcttgaggccaggaatttaagactaggctgggcagcatcgtaagaccctgtctctacaaaaacattaaaaaaaaaaagaagaagaaatgacaggactgggtaaagaattgtccatgggtggtgaagaagaagcgaggtcagggatggtcctgggtttccagctgggcagatggtggtgcccttgctcagttgggaaggccgtggcgagcaggctggtgacttgacgtctgaagcttgcagtgctgtgggatagccaaatgacacgctcaataggctgagtcagaaatctagaactcttaagagagggttgcagctctttgaaggtcaccaacatagattatttcgggaaaggataagagcccctcgggagcaaacagaagagactggcgtcctaacacaaaggtcccggcagtagcaggtgcctgtgcagactggttggagggaggcccaaagggtgtggtgtctggaagtcccatgaagagaatggtccgggaagaaatgagttggaagaggaggacagaaaggtgtccctggggataggcaccgtagaagtcactcaggaccttgtctgacttgagcaccctgaccttcccttcctatcactgcctgcatccaggcctgcttgggtctaggcctggcaggtgcagaggccaaggcccggcctctctgcctccaaacaaagcctcacccagggccactctttgaatggcaacaggcactgcccaggcaggcgacaggctcctctctggtgaccttgtgctggatgtgccccaaggcgctgggtagggctttgcagccagccccaggcaggccacacatggatagaaccggcagccctcccttttcccaggttcttggaatattctcattttggggctctgagttttctgttggcctcagtgcctctcttttctggctttctatcacagagagaagccgctacccttgaaatttgatgaatgcctgttcagtaggccctggcatttctgtttccacggccctttcgtccctcagagaagccttagagagcattttgcccacccctgataaaacttctcccataagaccaggtcccacttctgtgcttcatgtcttctgcaaaagtctgtttgctttttgtatggtttctgcaaatactgaatttttgaaaaagaaaaaaaaacaggaaatgacctttctagtatatttggaaaacaatttggagcttgtaatggaatctgcctgagcaatgaggactaatagctgcagacttggaacagaccatgtagctcttggcagagcctggggcctcttcagtttacaaagctggggggagtattagaaacccacgggagaagtggcttcctgtggggaaatgcccagagcaggcacctgcaggcactgtaacctctgaccccagggccccaaaaggcctggggacagagtataagggcttcaccctttgtcctgggcattcaaggtcaatcacatgtctggcaatcatccagatcccacaagataccaaaacctcctgaggatgaggaaaagaaagagcttcattctttagcaccctgtagggctcaggctgagctagaagattctagattgtttttagactcaaattgcctgttggctctctgggtccctctctatccaacttttctgtagatttcagcaaaaaccacctcctcagagaggcctttcctgatcatacagccattaactgcatgatccacatgcagagaaccctctcctcttctcccatagcacataccataatctgtgataagattcatttacttgtgcagtgcctttttctctttacacattgtaaatatcttttttagtttccagtatataccctatgcccggcacagtgcctggcatgtagaagttgctcagtacattgaatgaataaatgaaatatcaagactggaagacttggaggccaggtgcggtggctcatgcctgtaatcccagcactttgggaggccgaggcaggtggatcacttgaggtcaggagttcaagattaacctggccaacatggtgaaaccccatctctattaaaaatacaaaaaaaaaaaaattagccgggtatgttggttcatgcctgtaatcccagctacttgggaggctgaggcaggaaaagcacttgaaccggggaggtggaggttgcagtgagcagagatcatgccactgcactccaacctgggcgacagagtaagactccatctcaaaaaaaaaaaaaaaagactggaagacttggagatcatatttcaaacttcattatttagatggtgggaaaggaagctgagagagaaggggactcatcaagggtcaccctattgcgcgggtattgaaccagatcttcagccactgttatgatgcagggccgcacattctttgctcttctttccctgtaatctagaacatcttctattattcacttgttcatcagctattcattgagcttcaagtatgtgcagggccttctggacgtaacagtaaacacaccagccagggtcaccacttctggggaatttatattcttaccacacaacaccataaagcaccaaagaaggaagttttaatcttctgtagcaccgttaaacagagtaaaaacaaaggagctgaatgaaatgtccaaaggcaggttttactaactcagcccccaaatgaaccatcctaatcatttattaattgcattccacttacattccccatcacttactacactttttgcatcaccatcttattgaatcttcataacagccccctgaactgcagggtgtgactgttagccccgctttgctgaggtgaggggagttgtgcacggcccacagctggtaaacaacaaagctgggctggacgagcaccctagatgccttctaccctgccacccattcccctcagagatttgtaatgtcatcagggactcccaagggggcagtgtgatgtggggaaaagagctctggaccgggagttaggaccgctagatcaagaaccctgggcaagtgccttgccctttctgagcctccgtttccgcagctgttgatgagaggcttgtctagatgagctctgggatgtctttcggttagattctacaacaacttttcattaattgaacaggtatttgccctgtgatggtcctgaatgaatcaaagctgtctccctgctggagataggtcatgggctgttggaagtaaaggtttagaactcaggagagaaaagactgtagacccatgtgttagggcatattagtaatcatatattgagaacatccttccgtgtcaatatacataaatggattggcctgattctttttaatcattgaaggtttctgaactgagcatgaggatgagccaactgatgttggggaatgtccctcttgaagtagaggacagagggcttgaggatgaattgggggtgggggtggtgaggaataagtgagaagactgggggcagaaaagccagttggggaaggttgtagtagactggatagagatgatgaagcgtaactgaggccatgattactgcatggagaaaatgggaagatggacctgaagagagaaaataattgaacctgggtaattgagctttaaggtgcaggatgccttcttaaagagaggaagaagtcaggcatgagttacgggtaataggtttttgacttgcataattgattgtggaggtggctcctgactaagggaatgaatgagagagagtcctggaggagggagagcataattttgttgatatcctccgggaggattcatctagatgtctgcagctcagcaatgaggggatcgacattgaaatgaatggaagatgatgtcatgagagagaacgagacgtgtagaacaattagagaaacattagaagagagtaaaggatggaattaaggagatatacaagtagtcaaggtgttggactaggagaatgtaaaagagcattctgagaagttgaaggcagttgctttactgcctgagccttagtttcctcatttctaaaatgaggattagaatcgtgcctactcgttgtgtttagggttacatgagagaatgtgtggaaggcacttaccttgcatatcagaagtagaactcatgcaataattcatcattcattccgtaagtaagagtcaagcaccagcatatgccaggcagctgggccagccctttggagtacacagaggagcaaaagggaagtctgagtgcctgaccttgtgggagaggaattgtgaaagaaagaagactcaatatcataaaaatgtgatttctatctacattcaggtaccagatattactatatatatttaatgcagtcctgataaatacaagataaattgggggacaagttaaatgactattaagtttataagaaaacatagatcagcaaaaacagccagaaaaaaaaaatctaaagtcaaaaaagatttgagctatgagaaggaaaccatcctacaacatgatactagtatatgagtagacagatcagctggagagattaaaagattcagaaacaggccaggtgcggtggctcacgcctgtaatcccagcactttgggaggccgagacgggcggatcacgaggccaggagatcgagaccatcctggctgacacggtgaaaccccgtctctactgaacaaaatacaaaaaattagccgggtgtggtagcaggcgcctgagtcccagctactcaggaggctgaggcaggagaatggcgtgaacccaggaggcggagcttgcagtgagtccagattgcaccactgcactccagcctgggcgacagagtgagactccgtctcaaaaaaaaaaaaaaaaaaaaaaagattcagaaacagaccccaatacacagttttgtatgtaacaatgatagctttttacatcaatgaggaaatgatggattactccacaaatgatttgagataggtagaaaaaattaaggtggctcgctaattcataccttattacagataaattctagatcaaagatttaaatgtgaaaagggaagccataaaagtactagagaggccaggcgtggtggctcacacctgtaatcccagcagtttgggaggctcaggcaggagtatcacttgagcccaggagttcaaaaccagcctgggcaacatagtgagaccccatctcttaaaaaaaaaagaattagctgggcacattagcatgcacctgtagtcccagcttctcaggaagctaagctaggaggatctcttgagcccaggagttcaaggttgctgtgagctaggctggcaccgctacactccagcctgggtgactccagaccctgtctcaaaaaacaaagtaccagaaataaacaaagggatttctttactaatcttagagtggggaagacatttctaattatgttacaaagcccagaaaccataaaataaaataaagatcaattttactaatgaatataaaaatatgtatgtggggagaagtgccgaaaaataaagtcaaagtacaaatgacaagtaaaaaatactagtaactcctaattagacaaaagactaattgccttaatatattaagaactcctacaaatcaataagaaaaagacctaaaatccattagaagtgggcaaaagaatttgaagaaacagtaaacagaaaaggagatgcaagtgggaagatgctcaggttcactcctaggagcagtaggaactaaaacaatcaggcactggttttaaaaccaccttttagattaggaacaaaacagcattaagaagactgtggtgaaggaaagtgctcatctgatatacctactggggattgctatggtttgaatgtgttccctccaaaataccaatgtgataatattaagaggtagggcctttaagaggtgattaggtcatgagggctccttccttgtgaatgggattaggcaccttttataaaagggcttgaggccaggcatggtggctcacgcttgtaatctcagcactttgggaggctgaggtggctggatcacccgaggtcaggagttcaagaccagcctggccaacatggtgaaacctcatctctcccaaaaatataaaaattagctgggcgtggtggtgcacacctgtaagcccagctacttgggaggctgaggcaggaaaatcacttgaatctgggaggaggaggttgcagtgagccgagaccatgccactgcattccagcatgggcgacagaacaagactccatcaaataaataaataaatgggcttgagggagtgagtttgcccctttttgcctttctgccatttgctctgtgagaacacagtgttcaaggtgccctcttggaagcagagagcaggcctcaccacaggctggcgccttgatcttggacttcccagcctccagaactgtgtgaaataaatttctgttctttagaaattactgagactcagatattttgttgtagcagcacaaaacggactgagagacaggaactaacttctgtggggagaagttggcaatacctgttataataaaaaagtcacagatcctttgaggtggcaattccacttttatagaaacaatcctcaggtccatcaacagggaagtaattaaatcaatctacaacagtgagacaacagagtatcatgcagacaataaaaggaacaatttagttattactttgggtttgttttcagtgtgttgatgtaatcagtgctgcagtggcttcagagtgatctacagttgtttccaaggtgtgtgtgtgtgtgtgtttgtgtgtgtatatgtgtgtgtgtgtgtatatatatatatatatatttttttttttttttttttgaaatagagtctcactgtcacccaggctggagtgcagtggcgcaatcccggctcactgcagcctctgcctctcgggttcgagcaattctcctgcctcagcctcctgagtagctgggactacaggcgtgcaccaccacacccagctaatttttgtatttttagtagagatggggtttcaccatgttggccaggctagtcttgaactcctgacctcaggtgatccacccgcctcagcctcccaaagccaagacacatttttaaatgaaaaaaaggcaagatggaaaataaatttttttttttttttttgagacggagtctcactctgtcacccaggctggagtgcagtggcacgatctcggctcactgcaagctccacctcctgggttcacgccattctcctgcctcagcctcccgagtagctgggactacaggcgcccactaccacgcccagctaattttttgcatttttagtagagacggggtttcgccatgttggccaggatggtctcgatctcttgacctcgtgatccacacccaccccccgccgcctcggcctcccaaagttctgggattacaggcatgagccaccatgcccggccaaaattttgttttaaataaaggaaaaaggaagggaaggagaaaaagggggaacatatatattgcataaattttgtctggaaggacaccaaaacgtgcttgccttggggagggtgtctggatcggatgggaagggagactaagctcttatctctgtccttttggaccttttgagttttagaccacatgcacacataatctaaaattaagtaattttaagatgaagtgaatgtgttcactataaaaaggaaatataacagattttaaaattacttataaaaatattaatgtatgtaattatatcactggtattctttttcatttaactatatgtgaacattttgccatttctttaaaaaatattcacaaacatcattttaatgcctgaatggtatttcatttagatacaaattagttaagtatgtatatattaataattctccattgtccgtttaggacatgtgacacatccatttaggaactcattttggtgtctttagtttcctgctattataaataatactgtgggccaggcgcagtggcttaggcctgtaatcccaacactttggaagtccgaggcaggaggatcacttgagcccaggagtttgagaccacgagtttgagaccaccttggttaacataatgagattcccatccctgaaaaaaaatgagccagacatggaatagtcccagctactcaggaggctgaggcaacaggattgcttgagcccaggaagttgaggctacagtgagccatgattgtaccactgcactccagcctgtgtgacacagcgagaccctgtctcaaaaaaaaaaaaaaaaatactatgaggaacatctttgtacattttatcttcatgtagatcttggattattttcttagaatagattattataaactgatttagtagctaaaagatatggaaaaagttgaggtttctggatacacactgtcaagtcactgcccaaggaggtcttggaagtttacagtctcattaacagggtttgagaatgaccattttctgacaggatttccaactctgaggattctttatttccccatttgctgttgactctaaagatgagagggtgagtgacgaatataaatatgggagaaaaataaaacgatgtgtttctgctttcgattggagagctccccagagccgtctttggaattgctgttccctgaggggatatggtagccagagcatgttggcccagctgatgttttctaggattggtctttgagtgtggcatttgctgtctctgtgtcccgagggccagtggcctgcactgggcagcctgtaacatcagatggcattgtgagatcaaagccccaggagacattccagcatgaagctggcctttcagatagagcctgtaattccatcccatggtgtcaggtcctaggacaagaacacctgcacagcactccacggtgcacggaggcccttctcaacagccccaagaaggaactgcggctcctccccacagaggacaggcgggcagcaggggagaagagggatagacacaaactccctctccttcagaggcccgagagtgaaatccagcgagtgtgcatggagcgcctgctctttaccaggtgctggatgagaatcagggaatgcagcggccagaacctgttggctcagctgccaggattaggtttcagctggacatgggaaaaatccagaccaaattcctgttcccgtggagctgacagtctaactgaggaagagccgaggactcggaggctccgggagccagtgtggcctgctcggggtttgtcattttccagagcagcgggtttcaggtggggctgaggcccttctgagccgtggctgtaaaccggcctcactcacctcagagggcagctgtggccactgagtgcgtgatgtgtatgaaaacacaggcacctgggccatggtacctttccttatcgtaggaattgtcagcatcatttttatcctctgttattactgttattatcataagccattttcctgtcctgaagcattgagcggtttccccagaggcagagcgcaggagtgaacctccgtgacctgtagaaggagccacctctggaacttccgggaattcttttagccaaggaggagccagagcgtgactagggcagcgcgcaaggctgctaggaagataggcagggtgcgccatctgctgtagccggggggaattgccgtggacagtgtcctggccctcctctattttacacaggggaaatgaaggccccaagaaaggcagggtcttgcccagggttaggtggcagagcttgggtttaaggtcacgtgtctcattctttgctctttctaccataggacacctccctgtctcacctgtctgatctttgagggcccctaattcattctttaggtgtttcttctgagctaggtgttgtggggggatgtgggccttgccctccatactgatcctcttctctgtctctctctttctctctctctctctctctctcttctctctctctctctcacacacacacacacacacacacacacacctgcagcacttactggctcaaccccaccctgggtgccttctgggcacttctgccaatgtcagctaccttctaaaagcattgcacaataatttgggtttataaaacttcaaccattgaaaaaatatagacttagaaaacgaaagttccccttaatcacaaagaaccacagttgacagggttgatagatgttttttcagatttttttttcatatgtctgctatctttccccacaggaactgggttttattttaggtgttgttttgcaacctctgtttttcagttgccagtttatctcagacattgtcctatgtcagtacaggcccatctggcacatttctttattattttttttttactgacatgtcattgtatatatttgtggggtgcaacttgatgttttgatacatatatgttgtataataatcagatcagggcagttagcatatccatcatctcatgcatttatttctttgtgatgagaatattcaaaagcttctgtagttattttgtaatatagaatgccttttttttttttttttttgagacggagtctcgctctgtcttgcccagggtggagtgcagtggcgtgatctcagctcacggcagtctccgcctcatgggttcaagagattctcctgtctcagcctccagagtaactgagactacaggcgtgtgctaccacacccgactaattttgtatttttagtagaggcgacgtttcacgatgttggccagcccagtctcgaacttctgacctcaggtgaactacccgcctcggcctcccaaagtgctgggattataggcatgagccaccgcacccggcctagaatgccttattgttaaccatcaccatactgtacaatagaacaggaacttactgctcctatctaattgtaactatgtacccgttgaccagctttccatcctttcctctcctctcccctccccagtctctggtaaccactgttgtattctctccttctatatcaacttttttttttttttttgacagagttttgctctgtcacctaggctagagtgcagtgtcatgatcttggctcactgcaagctccgcctcctgggttcacgccattctcctgcctcagcctcctgagtagctgggactacaggcgcctgccaccacgcctggctaatttttgtttgtttttttagtagagagggggtttcaccatgttggccaggatggtctcgatctcctgacctagtgatccacccgcctcggcctcccaaagtactgggattacaggtgtgagccactgtgcctagccgataacaaatttttttttttttaagattccatgtatgcgtaaaatcatgcagtatttgtgtttctgtgtctggcttatttcacttaacattatgtcctccaggtttatccgttttgtcccaaataacaagatttcattcttttttatggctgaatagtattcctttgtgtatatatacattttctgtatccattcaatcatgttggacatttgggttgattccatatcttggctattataaatagtgctgcagtaaacataggaggtcagatgtcttcttgacataccaatgtcagttctttggatatatacctagtagtgggattgttgggtcatatggtactgtttttaattttctcaggaaccctccatactgttttccatagtggctgtatggcacatttcttttttatgactacttcataattcacgcgatgcctaacctcctggtggacatttgggtggtttcctataggctgctattactgaccaggtgcagtaaacatcctcacactagagaaaacattgggcatttgcctgagtgggtctagaactaggatttgctgggtgggcccatgggcccaccccactggactatgaactcctaaagtcaggccagtgcttagaccacccctcccacttactaattcaggtctgcgaggtagccagagtccatgcaatgactgctatctaattgccttcagaaaaccataggtgctcaatgagagatactagtatccccttcgcaaattaaccttttgttaatatagtagcagtacttcttgttgccaagagtacataaatggacaatcttgtgtgctactggtgggaatataaataaaaacagcactgactttataagtctttctgccaattttttgtcatcatgaataccactgtgctatttgggaaggcaactgggaaatgtgtcaaaaatctaaaaattatttcacccttccctttagcccagcagttctacttctagggatatactctcaggaaacaattagggatgggcacagagactttcataaagtcccagtgctgtgtgtggcggtagaaaacagggaagtacctctgtgttcatttctggaggcctcatcctagagtaaatcatggcccatccaagcatgctggcacaaaattcatgtggagggagacttagtgacatgttctaaagcgtcccaaagagtaggctacaaaacacaacataaggtatggtcccaaatcatttctaaatgtatgtggctcttctttatatatgtggcactcttctctcctttctctagactgtgttaccaagcaccagggctgttaactgctgtctctgtagtaagaactactaatttattttttctttttttcgagatggagtctcgctttgtcgcccaggctggagtgcagtggcacaatctcggctcactgcaagttctgcctcccgggttcatgccattctcctgcctcagcctcctgagtagctggaactacaggcgcccgccaccacgcccggctaatttttttgtatttttagtagagatgggatttcactgtgttagccaggatggtcttgatctagaactactaatttcatatctttcctccccactccacctctcttctgagctccagcctcctagttccatgtacctagcctacctctccccttggagggctcacaggcatctcaaagttaccgaataggccaaacaggactttatgccctcaaatattcctcctttgttcttccatatgtcagcaaaccacacttctgtccacctacttattcacaccagaaacctaaattacctgtcaatccaacactacttcttgttggttcgatttccaagttatatctagaatccttcccactgcccccctcctccacccaccatcttggcacctgaacttcacaggagcctcctaacttgccccttcccagcactgctgtgcccggccgccacagtcacctttgaaaatgcacggctgctacttcatggccttgcctaaagcccctcaggaaccaagttccagatgtggtctggctcctgcctacctcagcagtgtccttggtgtcattgtccctcttctgccatgctcccgcctgctggctctttctgtccttccaagccctcatgcctccctccctcagagccttcacacatgctgttcccctctctgtagtgctcttcccctcactcttcatctgcatgacgcctcgtcctccttggttctcagctaaaatgtcactttgtgacccccagccttgatcaggtcccagtgatcactccagcaccctgcattctcccttgaagccttgagcaccaaggccatgacttaggtacgaggtgactttatgccacctgtagtagatggtaagctctgtgaggccagggaccatggccagtttgttcatggtggtatctgtgccagtgcctggcgcatggtattaataaatgtgtgtacatgtttgtcaataattttatttaaagaaaagtctgagcccatgttctttaaaatgttgatggtggttgtctgggtgtggaattatgagtgacttgttttgttctttgtacttttctgtgctttttgctttgttttcaataagaggcaataactgtcattttgacagaagccactgtgctggggaactggagctgtcctctctgcagaatgcatctggacttacctctgcccccttgccttctgtccccacaggcctgaggagcgatgcgacaggcatgatggaggtcgagtcctcctactcggacttcatctcctgtgaccggacaggccgtcggaatgcggtccctgacatccagggagactcagaggctgtgagcgtgaggaagctggctggagacatgggcgagctggcactcgagggggcaggttagagccagcaggtccttggcactactgcatgccagaggccctctgccgggccccgggctagcctccaagtcctagactgcccatactttcttagagaagaaaccacatttaagtcaggcctgccccatggtcagtggcagagtccagcaatctctaggttggaagatgtttgagtctcaggccccaaggactcctctggacaggcatccgggactcttcctgtccccctgccccctagcccaggtccctccacttctcgctatccccacagctatacctggctctggccactcacagctctcacctggctgactttagcggccggcttccctgggctccctacacccatctccgcccttcctgttcagctctatgcagcagccagcagaccccatttaaaccattctgtccatcatgcttctgccaaaaaaaaaaaatcccccagtggcttcactgagtgaagctaagcttgtcacattgccctggggcagtcctgctgtaggccgggccctgcccaagtctcacccggtgccactcctctccctgacaccctccagctacatctacctttggtctgtttctcagtcaagcctctccaaggggccttctctgagtgctagatcagccttccccaatcacatgaccctcatcactctctgacaaggtctcaggggtctaaatgtgagcgccgggagggcagaggccttgcattctgtttggcacacagcaggtgcttggtaaccacagaccgaatgacaaaaggaaacagcatccacccacccaagtcctggctggaacacccccaccccctccattcccccagagaaccccttggctcaagtccacagtcagcctgggaatttccttgggaagcttccctgacccctgcacggctgaggcctttccctcctgctctcacagcgccacagaggccgtgtgtgcttctcacagcacagccatcaggctgcaactgtctccccgtgggctgtccggagggccacagccctgcccctccctgggtagccctagtcttcttgcccctcactggccagaagtgaatcaaaagtacagaacagagaagactttgccggggcttggacccagccctctcatgttacagatggacaaactgaggcccagagaagttggaggacttgctctgggccacccagggagttaacatagaatctggccggcttgagagagagcccccagcaccctgtcgacggaaccccaccccaaaagccttccctgtcccataatctattcattctcctctgtcacgtggcccaggcagaacctccacaggctcaccctgctcgcctctccagcatcaactctcatcctctcgccagccatagtcaagtactttgatcgctcagaagcccctgtgggccttcacacgctgcacctctgtttgcttctcccctccctccccttgcctggctgggttctcttcattcttagagacccaggcatctgctcagctgagaagccttccctgaccgcagtacccctcccagaccggggaggcacctcttctccctgctgcctccatgagcccactgagcataatggccctgctctagactgagcttctccagcacaggctctgtgtcttgtgccctcggtgcctggtggtgtttggcacatgatggaggtaccgagtcaatggctgttcattgaccgactgaatgaccagcatgtccagctgccacactgggcacgctgccctgggctctctctcaaggcttctgtgtcctcaccctcagctctggtgagctctgttctgtctctctctccctcagcagttgtagctgctggcccatgtgcccaggctctcctaacacctgttttccctgactcagattccctaaagtatgggtcctctggctacatgacattcacctgccagggtgactgacatttaaaaagggggcctgaggaaagaacagtgctcactgaaggaaaggaaacactcacggtggcgtccaggcaagagtgactggccaaggagccttccaggaagcccgcagggagcagttccgtttcacaggcggggctgcgggccacgcccactccagcgactccccaaggcagggggagtacagagttccaggcgccaccccgctgggaataaaagcaggctttccaggcagcgggctcggaatagggtcccgagctaccacccacttcctagcttgccgcaggggcacagtgaggcagtgctgatgtcaggcctctataaaccttcaggaatgctgcttattggaggaggttaaatttggtagaaggggtactagccttggtggcaggcagggctctccacccttgatccaggcaaatcagctcacctcgctgggcctcggttttctcatgcatatcatgaccctagttacacctccatgttactgtgtgcattgcacgagaaagtgcccatccatctgcagaccctggagcttgctatagggtggtgattctcctggttctgtgaagggcttagcctgaaggataaaaaggtgtggtctggttgggctggatttgaactcaggccctcagtgagcttgtagggcacctagtaacattgcacagtgtcactggggtttaagaatgtaccacctattgagctctgcccacatgccaggccccacgtggtgcaccttatgaaaagacacctgtttatcatgcagcctgaggaggaaagcatggagactggggcctgggtgtgagtttggcactcccctcaacctgcactgctggtccagtgggtggcaggagctgcctgtcccaccttgcacaggggggctcaagggaagctgaaagtgaggagacttggcttgtatcctgactcccctcagtgaggtgctccatctctgtgagcctgctgctgcccctcaccccaccaagatgtctgacaggatggatttgagaaggaggtacaacacacaccccatgatgcacggttggcccccacagactctgatgcaggccacaccctggcgctccctgagctggcctggttcagtgctctttactctcttagaagaacattggccgggcacggtggctcacacctataatcccagcactttgggaggctgaggcaggcagatcacctgaggtcaggagtttgagaccagtctggccaacatggtgaaaccccgtctctactaaaaatacaaaaattaaaaaaaaaacaaacaaacagaacagctgccatttgctgagcacctgtgacacactggggacttaacatctggcctctccctctggggaacctgcacaaacaaagcaaccttcaagagcccttcacttgatgctttaagcacccatccataatggcccttaattgactcttaattatactaacaaacactatgtgtatttccatgtaaaaagatgttacagaccaggctaaagtccataggccaccaccacctcagtccagctccagctcgtcttgctccccagggcatatccactgctatcagtttggctgggccctttcacacctccttctgtgcattactttgtgtatatgtgcccaagaaaaacctctttctctcctctccagaaggacaggtggagggaagcgccccagacaaggaagctggcaaccagccccagagcagcgatgggaccacctcgtcttgaatctgaccttgtccaagaaggctggacgagagaccttctgtcccctcccagagggggaaccctggcactggcccagcagcctcttctctgagctccatgtcccagataaaccaggccagactgagaaggctccccagaggcctctgtggcctccactccgggaaagccctctgcccacacccacaggcttcacattcccaccaccttcgcaccgtgcccaggtacactttcaagacactgtaaccacaagatgttatttattgagctggcgccgggacttgggcggggcctgccctacagtgagcagcccacacaggaacgctcctctcgcgagcggcccgggcagggaccctgtcccaacaccaacacctcctctccagcccaatcttctgggtccagacctgcttgtcccttttttagaaaacacttttaaactttttaaaaattttaaaccttttttcagcagatatggagagagctgacaatcaattcacattttttaagccattttagctaaactgtcattgtgcatctctgaggttccctcatggagctccacagatccatttttagggaagggattttggctcaaaacgatctgaccacctctgccctgtccaccaggataagtgacacctaggacccaggaaataaatgccgatgatttgtgtgactggtttaagattatttctccttaaccttgcaaaaacaggggttgggccttattttccccaagtccacaattagccggacttgccccaggcttctagaacatacgattctgagaagatgctggcgttctgcagaggccagcaccctccaaggccagtgtctgatgagccctcttccatctcatctgctctcaccccaactgccagcttcaggaacccaaaaggaagctttactccttaaaacctagagttaggaggggctgagagttcagggaatgtttgagcaacaaccagagaagccttatttcttctggaaggaggacagcctctggacccctcttggcccacagcattgggatctctggcctggcattcacagccacccttaggctcaggccctgctgctgagcaggctgacccagctccctccatgctcatcctgcccacatcggcccgcccaagaccaccaaattacatgccacctgctgcatgccaccagccatgggcttctttattgagcaccagattttcagtacaagttgccacagaaggagggtttcagattcaaccatgcccatgtgcaagggcgctggtccctggccagggcacataatcagagaagtgacgcggccatgccgaggtatacgtgtgtgcagaaatggacacatagggttcaggagcatcagtaactgactattgagatcatggtcttcttggaaggaataaatgtaaaaatgttgctcagccccacagagttggggtgactccacagggtgaaggcttggaggagtggcgtcttcagaggttctgccctgctcgttggttcagagaagcaaaaagatcaggcaacttgtagtacccaggatgttgtaaaaatcatagaacaccagaaccagaaaggaactccttcctatgatggcaagaagatgccttgccaagaccacataggaagaaaggagcagaacaggcctgggcccctctccctgcccttggctttgggcagccatggaggtgtccccaactgcccagacctttgggactgggcttcagaaagtctccccttagaacagcctctcaagaacttttatagaaaacaaaccgatctaatgagacgctgctcccagccagggcccagaaaccagggagtcatcacacattcatggcgctgcccaagaatggaagggcatcttgctagaagtcccacagaaagccacactggggccaggacagggcaactgcccagaagcccagacaggaacctacctgcagaggctgaaggtggcatcccataggctttatagagcaggtcgagaagctccctcttttcatcttctgggaggaaactagatttggccgcattgatgttctggaaaggccagaatggcagacaacatggaaccagagaacaaagaaggcagctcttagcaatgtagtgatagtccatcctcttcactcaacatgggcagatacgcttagagggggaaggatttgtccactgtcacacggcagcaagtgccagagtagagaccatgaggtcgtgttcttaatttgtcattacatgaaaaagggctgtgagaaggaagttggagaaacctttgagagacagggtggcatgtagggggccagagacacctcgcagacacgtgcaggaatggacttattcagcctgggatttaagaacaacctgaagagagtgtgcaagacttcatagctgctgcacacacctttctggggagagggttgacagctttcactggattctttaaaggcactcaacccaagcaaaggatcaaaaacctggtcctaggtcaggacgtcaacacaaagatgtcttctctgtggaaagtgtctaggttgggcttgtcttggactgttgaggcagactcactccctctctccaaagattccaggccccggactggacctgtagataccatactcccaaacccgagtcaaggccagtatggctcacacccactcaccagccttttaaactcctcttcagtaaagcccatgtcccgtttggtcatctggtaatcagtgtccagggtggacttgaagatgagcgggtcatctgtgttgagcgagtagttagcctggtcatttttgagcctgcagaagagggaggaggagagaatcagcctccttttactcttacataaatagtcagaacacattgacgttcacccgcctttgatcctcacagcagcctcaaacagatctgaaagatctgatccttgtgcagagggggaaataaattcagaacttaggtgacttgttcaagtctatgtaaccagaaagtccagaatccagcccatcctgaagaccagagctgggcaaaggcagcagaggggccagacatgggaaccaggcagaatggcagccggtgggggcgtgggggtgggagccaagaaagcaacatccccctccggctgccaccctctccagccttcccctctgcaccctaccctgcttgttcctcagtcccactgggagctggctactccaacataccatggaagctgttcttggcacgatccctgaccaccatcttgttgtatctaatggatctttcctagctctgaccataatcgacttgcatagcagaatttcacactgttgactgtttcttgaaaccttttccctggatttctgtgacaccacacttttgactttcctcctacttgtctcttttgctggtcccttaaataccattgtccttctgggttctatcctaggcccttcttgctccaccacctcctggggccactgcttctccttcagccaccatatctgtgcagatgactcctggatctttttccagcccatggtatacccacatgcctccaagaacctccacaggtgccacgtgtccctaaggcaagccccaagacccccttgtcatcagaacatcagagccgaagcccctccccttctcatatgcctggcagatggataagtgctggcctgaccatggtcaccctgagttcttgctgtccttgtcttggggaaggcggctttttcctaaggcctgatactgctcctgtggcttggcgacaggacggaaggagggccttgaccctggttagactccaggatgggagccaggcagggtggaacagaccctccggtggaaagcttcaagatggcgctcaggggaatgcccaggggtcccaagggccaggtgtcaggaagagagaacatgctggccagagggactcctgcttcctatgcgatgcccagggggcagagttgggagaattggaagtgtggaagcttccctcagagtaatggagcgttctgctccagctgatgagctgtagggccccagctctgctggttagcagctgggtaatcccagtcaagccacagcacatctgggcctcggattcctcatttgtaagatgaggacggcaatgcctgcttcccagggtgtcgaagagatttcatatctaaaagacgcggcatgggctgatgcccaatccctaaagtttcttccctctttggccttcctggaacaaaattgaacaggcccaggggaacagagctcaccgaatgactgcatgctccgtgtccggcttccaggcaccagtgaggtagctggaccaggggcagatctggaagagcaggtgtgtggctggcagggatggccccaggccatgctgattcctccccccatgtctgggcctggggccacccctcgagttcctgggacccgccctgctttctgcctctctatacaggaagttgggacagccggggatggttcctccccactccctggcccgcttacctcgaagtgcatgttttcctgccgcagcctgttataaagggcctggtcttccagggtgtggtagccgtgtcccagccgctctgtcttgagtatgtccacagcctgtagagaagcagaatagagccaagtatgggaggaggcagtgaggagggaccccatggccagcccaggccctcacctcttttactacttcggccgagcccacctccccggcgtggacagtacggtgaatgccgctcttcacagcctcctggaagggggagagccaggtcatgggtgccctagcgggagggccccggcaggccctgccttgaccatgctgtggagattgaaccatcctagtcatgctgcctgcttcaacagcatggggaaacctggtcttttaccctccaagtccttatctaagtggtagctgtcactcattagccagttaccatgtgtcaggtagtatatgaagtgacttgtatacattatctaatattcacaactattatcccacccattttatgatgaaggactgaagctcaggagattcaagtaatgtgaccaaggtcagacaggaagtgtggaaccaagctctgagcccgggcagtgggactccagagccctgacttctccaccatgctgcaccctccacaggaggcccattcatcatcacgctggaagcgacttttgagatgtcggctccaactcagtcatcccaatagaagaaacagaggcccagagaagacacagtgttgcccaggttcacacagcaaatcacagccagaagcaggctcagcacaggactcccaacaccaagtggaggcttttctttctctctcccttccttccttctttccttccttcctccctccctcccttcctctttttccttccttcctctctttctttctctttcttttctctttcttctttcttccttttttttttttttgagacagggtctccctctgtcacccaggctggagtgcagtcgcattatcacagctcactgcagctttgacttcctggactcaagcaattctcccacctcagcctcccaagtagctgggactacaggcatgcaccaccatgcctgactacttttttttgtatttgcagagatggatctcactatgttgccctggctggtctcaaactcctaggctcaagcaatcctcctgcctcgcctcccaaagtgctgggatcacaggcatgaaccaccacgcctggcccagggggattccagttccaagccttaagacccaacaaagacacacttcagaactcaggagacaccatggtccctggttcttgtgatttctcccaactatgggtgggagacaagctcacccagggccagcctctccattccttctcacaggacccacctggtaggcctggacatgtccaggcaagaggctgcttcctgggatggtctcatctccagccaggtcaatggctaccacggtctgctgctggtacttcttacacagctccaccaccttgggggaccagtctgtgggcgagatgcccacccaggctctgtcaccagcaccatggagagacctcccagcctacctgcctgctgtcccacccaaaccccccatgggaggccagcacaaaacagggctcagtgtcttcaaatcctaactgctatgtcctaaccacatggcctgcggaaaactgctctgcttatggcctcagtttccgcccttttcagaaagaaccctgccagctattgcacagggtcacggccaggctttgccgaggccatgtgtgtaaagcaccaaggacggggcctgagctcagtaaatgacacggacccttctctcacctggtgtttccaacaacactcatggtaggcttattcccatgcgcagatgaggaaacggaggaccgtttaacacgtcatctaaaatagaactcacactagtattgggaagtatctcgctaatgtattaggtactcttaaccaataaagttattctgaagtgtttaagaaagaatgaatgaacacaggctttggaactagatgtccccggatacaaatccagggtttgtgccttgcaagaggctgcacctcactccacctcagtttcctcatctgtcaaatgggactaagcaatggtagttctgctttgcaggctgctgcgaggattagaggaaatgcgtgcaggtagctctttggttcttactaatcctgagggtagaggaatgaagtaagtgtgatcatctccttgtgacagtgcacaactgaggtgtcttggtgcataaccagagcagcagtgtgacctgcccaatatcacacagtgaggctgtgcaccatgaggcacaaactctagagatctgatctgcgtcagtgacaagggagacccctcagaaatcttggaaatcagacctattcaggcccagacaggatggggcctggtccactgggtctcgagggaggactatgggctgatcagaatctagcctagatttttttttcaatagttacgttcctatttggtgttgagcttcctgcagggtggctataaaggcatggtgtccctggggagaacatctccagaagttctgagcctgcctaggaggtctccagttgtttcatgaagccccaagttcatgccagtgggctcaaggggacaccatggggctgtggggcacaggggagatcaggtacagccccactgctaggccaggaggtcagggccagggtgagacgggcggccctgggcagggcggtgatcctactcactgggctggtggcgcatgcagcacaggatggaccgggccttgaccccgaagtctcgctccccctcctgcaggccctggcccactagggccaccacctcgtctggggtgaggtcccctctgtgtgaggagaggagtagggatgggcctgaggcaaaaggaaggcctaaagggcagctctgggactgggacagaggaggaagaggaggctttggggaggaccctcctcccccactgacccactgcctcagaggaaagactggcagagatgcccccaggccctagcatgtccctctagctcttaaagcagctgggtgctcctagatcttagtgggaggtgtggggtgtcaacatggccctccccacccccagatggacagcattgctaagcttgggcctgccatgatgttcacattctatatgtatcagaatcatggctcagaaaatggggcagggtggttttgtgataccacttagagatccatgggggcccaggcagggggctagaaatgggccagactcacttcagttatgaagttagagcaggacctttagggcctttagagatctgatcagcatcagtgacaagggagacccctcagaaatcctgggtggctaagcaggttaacattcctggacagcaggcctgtggccagagcaagacacagccaaacacttgtgcccaaggtaagaacataacggcaaagggaggatgggaaccacgtctcttgtgacagagttaaacccatctttctgaggccatggaccagactgggggcaagaacaaggtcttgcttgggtcagggattcccagcagttcgcccttccagtctcagagctgagcctcccagccacaccctcagcatggccccttccaggcccatcactcactcagcctggttccaggggattggctccactttggagttggccagcaggtgcggactgtaccgcacctccacatacaccacgccctctttggccttcatctctacaaactcataggcgatccttttgatagcctcccggcagcccctgggaagggaagaaaggggttgggaacaaccttccccaagtcccttgggagctccaggagcaaatgacatccccaacccttggcagattaaacccacttcatcccccagacccaagctctgggcatccactggataagatcccagacactgggcaagtcctatcagctctactttggaactgcataccagttctcacccctccatcctggcctgaatcacgccatctctaactggcctccctgtctccatgcttgcccctgtcatcctgttctccacccagcagttggggcaatcttttaagaaggtaaatcaaagcatatcacttctcccctcgaagccccagtagcttcctgccacggagagtgacatcgcaactcccaggtcctgcccacaaggcctgcatcctccaggccttgccagcctccccagcaccttccttctccctcattccctgaggccaccggagaagacacaggcctgctcttccccgatactgtcctacactgcgtctctcccgctcccctggtttagagccagctgaagcttcacctcctcagagaggccttccctgaccaccttatcttttttttttttttttgagacagaatcttgctctgtcgcccaggctggagtgcagtggcgccatctcagctcactgcagcctctgcctcctgggttcaagtgattcgtctgcctcagcctcccaagtagctgggattacaggcgcatgccaccacgcccggctaattttttgtatttttagtagagacagcgtttcgctgtgttagccaggatggtctcgatctcctgacctcatgatccgcccacctcagcctcccaaagtgctggggatacaggcgtgagccactgtacctggcccagaccgccttatcttaaaacggcccctccaccattctcctgggctttctttttctcccaggtccttatcactactcaacattgtgtgtcatatggcttatcagccagtttgctgtattccctactagaatgcagtctccatgtggcaaggacccctctgtcttgggatggctgcgacctctcagctgaggaccatgcctaggacagagtagcccaatatttgttggtgatggagttaaggctggcagggaagagaaatgagagaaaaggacacagctggacaagtccagagggatgcctggatgtgggagacacgtgggatacagtcatggacttggatccttgtgcccacacttatctgctgtgtgacccctggttagtcaccctctgacacctaggtcaaggagttattgcggggacaaatgagtcaaacttcataaaccccacccgggtcagtgcttggagcagagcggacaaatgctcaaaacattttcgttgttattactgcatgtttgttccagaagcaaggcacaaattggcctgccagggccactgtgttgatcacgtaacggtggactgtgcttagctggaagttcccaccatgaagagtgaaaatgaagtggttactagaatgtgtgagggaaggcacacaagtgctgggagagcccagcgtgggaagaaagtgccctgcccaggggagatcaggccactctcaggagaaggggtcaccagaagttcttgcatcttcaggatgaggatggaggccaggcgcagtggctcacgcctgtaatcccagcattttgggaggccgaggcgggcagatcacctgaggtcaggaattcgagaccagcctggcaaacatagtaaaaccccatctctactaaaaatacaaaaccattagttgggtgtgatggtgggtgcctgtgatcccagctacttgggaggctaaagcaggagaatcccttaaactgggaggtggaggttgcagtgagctgagatcgcaccactgcacttcagcctgggcaacagagtgagactctgtctcaataaataaataaataaataaataaataaataaataaagcagtcatggaaatttctctctagtactcgcccataccccttctgggccttttcggtacctagtgctgttccctggcgactcaagacaagaaaaagaaaaagccttttggagaatcttccccacatctccccgcccccaccctatattcaggcctctcctcccctcacaacacgaagccctgaactaggagatagatggcccgggttcaagccctgcactgcctctgaccctgtgttcttagctcccatattctgccatttctctgtagaacttgaagcaatttcagtccatcacacccacatctcagaagggaaaactgaggcctaaaggcactggagagactcactaagtgtacacaatggtgagaaagacagctgtggtttcagagcaacttctctggcccccacaggctgagggacaggcctggtcctagtcatagggatcaatgctgccctaggacctgtgggttgggggcaactcacgcgatagcaggcatgtagtagtcaaacttggccaggaagtctggaagggtgagcggcttgtccatgccaatgacgttcagcagcccctctgctgtgttagctgggagggcgatccctctcctcctggaaacaaaacagtgagtggtggaccaacccggggcaggatccaggcaggcctgacaggccaggatggagcagactcaggagcgccagcctccttgcaggaccacagcaggagacatgggcgtctctcagtccagctgctcccactggacagatggggaaactgagaaccaggaccggaatttttccagcaccttctacccccaatgcacaagtcagcaaatctcaagggggataaacaggttgaagtgtgtgtgtgtgtgtgtgtgtatgtgtgcacacatgcacacaccccctccatatccttggttgactgatgcttggagacaaggaaagtgccaggtcaagttcatggcttcctcctcagccccaggagctggctcagccagctggtcctatgcccagtcaggggttatcaggggcagtaactgcagcatcacaattcccagggtaggggcaggcatcaggacttcaccctccatctggctggcacatcagaggcttgcccagcccagcgcactgggagagggccggtggaggctcaggggaggggcccagtgggccgccagccagctcagacctctctcccctccctgcccacagccgccacaccaagctggactacagcagcgctcagtaagagcgtgctggaaacagcccctctggcttggagcctccatttctccccaagcatctcggcctcccctcccagccacgggaagcagggtgcgagctcaggggggctccctctcttctgcacacgctcctgcctcctcatcccatcccggctctgctccagctcacaaggtcacctcgagcctcagtttccccccccttttttttttaagatacaacagccagagaacaccagacattaagaaatgcttctaggctgggcatggtggctcacgcctgtaatcccagcactttggcctcccaggccaaggtgcgaggatcatgaggtcaggagattgagactatcctggccaacatggtgaaaccccgtctctaccaaaaatacaaaaattagttgggtgtggtggtgtgtgcctgtaatcccagctactcaggaggctgaggcaggagaatcacttgaaccagggagtcagaggctgtggtgagccgagatcatgctactgcactccagcctggtgacagagcaagactctgtatcacaaaaaaaaaaagaaaaaaaaaagaaatgcttctaacatgagggacaaaacaacagaatagacaaaagcactccgaggaaacagcacagagaacagatgaaaacctaagaaccaaaacaaaaaagacatgaatatcctcaaagagatgagaagatccttgaaaggagggaacattcagaacccaagaacgagccctcggaaatttacaagagaatgcggcagcaactgtcacgatgtaagaaaagaactggaagctaaaagtgaagaaatcctccacaaagtagaacaaaaagacaagatgatgaaaaataggagtaaacagttaaggaaattagaagattaaatcaggaggtccaagcatccaattatccacaaagcagaagcagaaaaataggaggccgggtgcagtggctcatacctgtaatcacagtactttgggaagccaaggctggcggatcacttaagcccaggagtttgaaaccagcctgggcaacacagtgaaaccccttcaaaacaaaaattcaccaggcgtggtggcgtgcacctgtagtcccagctacttgggaggctaaggtgggaggaccacctgagcctggaagtcaaggctactgcgggccaagattgcaccactgcactccagcttgggtgacagagcaagaccctgtctcaaaaaaataaaaaagaataaaggaggaaagtgccaaagaaacagaagtttgaccaaatagtgttttagtgtatgtaagtaagtttgtaagtcctttaatagcttctgttactaaaatattaaaatgcttccctacataaatatgtttcctaagccccctgaatgtgctcccttccccatctgttagcccaagtccccatgagtgcccagagggtaccaccaaggggtcatgctggtgcccaccagcctgctagtcagcccctaatcactgctccttaccagcccctaatccctgtaagagcctgcaggggaacggtgccctggtgcggcattggcacctggaggtcggagctcagtgcctcaggtacccctgagactgcttcccctcccactgctggccagctgccccaaagtcaccctcacaaggccttgcccagtaactgtggccgctgaagagcctgtaccagttgtcaaacactgttggggatatcactctgggaactgctgggtagaaggcagggagatgacactagggctctggctcccatattgccaaacccagtggccacatttgcctgggacctgctgcgccagccatgtgcgattctcctaatggtctccctccagcccccagaactccacctgcgggggctctgccctctggtcgttctctctcagactctgccttttacacacctggccaggccaactcatctcctttggtggttttcagctccggatccagaggtccacagcttctaattctctatgcccatacaccaccactgagggcctgtgatgtgctgggcactgggcagatagcagtgaccaagacagacccatgtgtctggctacctgttgagaggcaggcatctcgcgccacctttcccctccctctagatcactcccttcctgggttccacatttccaaatacggctcctccatctacccagctgcccacaccagagacgggcgcctccccgtgcccagcaccagcccgtcccctagaacaaattattttgctttctatttctcctcttcgattcttcttctccagcctccctcctcaacaaccatcaagaaggaacttctcaacacagagtttagacagagcagccagggaaggcctctctgaggaggtgacatttcagcagaagccttggggtgggggcagttctgggcaggggaggggtctgtactaaagctgcaggcaggaagccgcgggcattggaagtgcagggtggctggaggtcagagagcaggcatttgtgcagatgatgcaccagggaggcagggccaggctgggcttaggaagggactggggctttggctgaaagcactgggaaggcactgtaggatttcaagcaggggactagcatgaaataatttacctttttgaaagctcctctggctgctgcgtgggaaacaaattggagggaagccagagctgaggccagagagctaatgtgggggcccgacaggagacaaagagcacaggggactcccagtgtctcccatgggacacagcttcccgaagctgctcagactgagctggaaagcgcccatctggagcccaaagttgaagcaggaaagagctgttcctagggccctggcacctcttgctgtccctggccacccacacaagcgaaggctcctcatagggccaccctctgttttttcttttgttttgtttttttgagacggagtcttgctcttgttgcccaggctggagtgcaatggcacgacctcgactcactgcaaccttcacctccctggttcaagtgattctcctgcctcagcctctcaagtagctgggattatagatgcccaccaccatgcctggctaattttttatatgtttagtagacacggggtttccccatgttggccacgctggtcttgaactcctgacctcaggtgatccacccgccttggcctcccaaagtgctgggattacaggcgtgagccaccatgcacgctctgttcttagatgatccctactccctggtcagccacagctgctgtgctggggcactgtctggtcctcttccggccttggtgggcaacacagtcacaagaagcccaccatcaggagcccagggagggagggaggatgagctcaggggttgcaggtcaagtccatctcccacccctatttaccacatcatcccaggcaggagcgctcccctctaaggcccttggtgcccttgtcagtaaaacataatattttccatgtaggggtgcacagaggaagaaatgaaactttgtgtgtcatgagaaagagcagactctgaagcccagtggtctgggtttgaatcccagctctgtgacttaaaggctgtgtgaccttgggcaagtaacccagactctctgtttcctaggtctggcatgtttgaaaaacatccagtgtggactaagcaaggagccttagagaggtcagagaggcaatgcaggctttgcagaactttaaggcccatgtgtggactttggctttgactctgagtgagatggggaagctggggaatgagctgggaagaccatgggttaaggctcttgctccaactacagcactgcagggcccgtagagaggaaggccagagtagatggctgagaccaatcaggaggccacagcaccagggaggggcagtggtggcccagaccagggcagtgatcggaggaaagagcagccagtttcagaatctctgtagaaatagttgacagggttataaacaagactgagaaagaggttggagaggcccctgaaaaggccagaatcctgggaactggaggaaggagaaatgggtgaggacagttaatgaggcaggcctgagtcccagagctggaaaaagggccactgaattgggcctagcagggctcaggccaggggctcccctcctccttccattcttagcccatatttgtgtgcatttacagacacccatatctgagtgtgacaaactccccagtcccctgcctgctgacttcaggccaagctccagctggcacctgccgcacgccatctccaaggcccagaggtggtgtgaggaatggacgatcagaccagtgcccctcccggcggctcctttcccctttctcttagccccacccggcgctcccagcccctggctgcagctgatgagccctccgtgaccccttaatgagtgcctgggttcgatctcatcttggtgccccactgaacgacctcattaggggccttgtggcaagttggcggcttgacatgggcaaaggccaggcagagataagccaagaggtttcaccccacttagagatataagctccaattaataagaatattatcattaagtgacatttatggagcacattaatgtgtgctaggccctgaactaagcattttacgggcgtcacttaccaaaacctctaactgacagggggtaatggccagggccatggactcgggggcagactatctgggttcaaacctccgccctgtgcttactgggcaccttactccacctaccacggctcagtctcctcatctgtaaatgacggcaatagagttcctatcttacaaattgttgtgaggcttcaataacttaacccgggtaacgcacttaaaggagtgtttggcacacaggaggtgctactgtgcttatgccttgcagttaaataggaattaaatcaatggcagcttcctggggcagaagaaggtccctggaagtgcgaaaagatggagaatagtggacttaccagaaatctctcagggagttggtggagatgctcccgagagttgggggcaaccccccgggatccctcattctctccatgagggcaggcctctgaataacaggattctggcttatggagcagaaatgttcaaatttgggtcccgagctgaatttcaagactgtgacagagaggctgagttctttcagctccaaacaaaatgagtgttgtgcaaacatccgaggaacacaggtctgcgggggcagggctgggtggacaaggagcccctagctcctaggtcatctctctagggagggcctgttcttagcctcagttgatagagaccaagttcgcagacaggagataatatgtccaaatttgaatccagatccactggcctttaaagtccctgcccttaaaagctggtcctaagagaggagctgctgtgagcccttgaggtctgggtaggaagggaagaaccttcctcgctggggaacagggggaccctctggccccctagcatctctgagagctgaggcaggaagtgtgttctcacttggaagatgcagagatttaggcccagagttggggagccacttttccgtgactcctagcaggttatgaccctgatgatgtagtaaagccttaggggtcagacagccttgggttcaactcttgatctgctattaatttgtgtgaccgtggacaactgtcttggctgagcccattccctcctcagtaaaatgcagagagcgtatcctcctcttccaagcgtggaggaattcaatgagctgataaagcccagcccagctctaggagatgctcaagaaattgtactggcatctcatgtgagcacatcacctgctatatataggctctcagttaagtcaaaagacaggagccaggcacagtggctcatgcctgtaatcccagcactgtgggaggccaagctgggtggatcacttgaggtcaggagttcgagaccagcctggccaacatgtgaaaccccatctccgctaaaaatacaaaaattagctggatgtggtggcatgtgcttgtaatcccagctactcaggaggctgaggcaggagaatcacttgaacccaggaggtggaggttgcagtgagccgagatcatgccactgcactccagcctgggcgacagagcaagactctatctcaaaagaaaaaaaaaaagacggattcagccctgggaactaccttcatgcacgtatgtgggtgggtggggagagcaggctcaggcctggctcacctgacaccaggaggacaagactcagaggcccagaaagctcaggagttggtctgcgggtctccagctcagtgctgaggcctccatgtcctcacagtcccacttctggcctggagctggcttgattcccacagggagacaggaaggaacagtgaccctggaattccccaggggcctctgggtggagctggggaccccactcaaatcccagggagagagggctcttctgtatggacttacctgccatagtataagatggtttcaggcttgatggatccgtctaggtggacatgcagttccacctgcaagggggcagggggaagagagagagaaagggagagagagaacaaatacctatgagttcacgaaggacctttcagagcttaatgttaacattaatcatgataaccattagccaccattttactggctggctgctgaccccatatacttcggtaaactctgtactgcactatctcatttaatccgctcctgggatgtgggttcagctgttatctcgatctctttcacaattgaggacactgaggttcggaggtgttaaatatctcatccaaggccacacagattgcaagtaatagaggcaggagcccaacccagtatctttgttcttaatcgcagctggtgagtggcagaggcggaattctaacccaagcccaattccaaagcttgtgctccaggtcacgtaggcagctcccgctctcagccaactaaataaactactttaacaaaagggattgacccagatgtcccaaactagggaagagtcacagcatatttcaaaattcaggatccattttcgttttcttttttttgagacggatggagtctcgctctgtctcccaggctggagtgcagtgacatgatctcctctcactgcaacctccacctcctgggttcaagcaattcttgtgcctcagcctccggagtagctgggactataggcaggtgccaccacgcccagttaatttttgtatttttagtagagacagggtttcaccatgttgctcaggctagtctcgaactcctgacctcaggtgtccacccacctcagcctcccaaagtgctgggattacaggtatgtgccaccgcaaccgacccaggctccattttcaaaagcagatgctactcaagcatagcctatcaggaatcaatattaggcaacggaagatctttctagtactctagagtttaagagtaggatccttggaggcagcccatctggcttgactcccagttctgctgtgtgacctcagacaagacacttgacctctctgagcctcagtttcctcaactgaaaaacaatggaatattatgcccccgtgtccaagaaaaattgtaaggattaaaaagggcagtgtaggtggacatggatagcccaaaggaaacagcccctgccgctcagtcagggtgtttaccatgagctgttaggagaagcacagcaggcagtgggagatggtggggaaagggactttgctgttcctgctgttcctgttccaaatgatggaagctttccccctagctaggggagatccagaaaactctcagctgacatctcatgctggggtggggagcatggagagctggataagaaagttggctgccctggctcagggaggaacagccaaggagctgctggcccaagggcgtctaggagcacatacatgagctgcctcctgcagaggaaacccaacccaggcccaggggaggccagcagggaacagagacaccagaggtcctatcagcaggacctcagagtcatcagatctctcctgaggtcatccagctggcaggggacagagcggtcttcacacccagtctcagggccaacttagttgttgaattccctgacaaaatgagttcagttcccacccagccaaacgtctgtttctcgggttctcaaaatatgctcagcattgggaatactgaagcttatagcccagggaacggccaaccagctgtgtgacctcaggcaagggacctcaactctctgagcctctgttttctatccttaaccctcacagggctatggagagggcccagccagagagccggagtcacactgtatagagcatcatgcggttagagctggaatctcggctcctccactcactccctgcttgaccctgagaaagtcacttcacttcctgtgcctcggcatcctcatctgttaagtggggagaatggcagtccttccttctaggcttcatgagggttaactgcattagtaggcagggagttcttggcacatagcaaatgctaaatagttgtcaactaaaagtcaatgaaggctgggcatgggggctcacgcctgtaatccagccactttgggaggccgaggtgggtggatcacctgaggccaggagtttgagaccagcctggccaacatggtgaaaccccatctctactaaaaatgcaaaaaattagccaggcgtggtggcgcacacctgtaatcccagctacttgggaggctgagacaggagaatcacctgaacctgggaggcagaggctgcagtgagccgagattacgccactgcactccagcctgggcgacaagagcgaaactgcatctcaaaaataaaaaataagaataaaataaaagtcaacgaaggcctgcgctcctgctggatgctagattgtagagttaaacaggagggtccaagtcctgttcctggggcttgtacaggccccagagtgggagaggcattaagcaaatgtcacatgggaaaatgtacagtcacaaaccaagacgactccttgggaagtacgaacacagtcctatgacagagggtaacaaacaagagaagtgaatacatctagagggccaacaatgagcctgagcgaaaagctagaggatagcgaggaacccacaacacaaggcaggggtgcggagggaggcaggaagaaaattccaggcagaaggaacagcatgtgcaaggccctatggcaggagaaaacggggtatatgaaatggattaaatagaggttcagagaagggagggttcatggtactggagaggctgcaggataggaccacccaggcagggctgtgcgggccacgaggagtcaggctttatctggaaagcacacagaggccattgcagggttggcagctggttagagaaagaggatggctcctccaaggccagttagaggctactgcagccatttgaaagatgacggtggcttggaccagggttgtgaggtgcatagaggaaaaacaggtggatagaaagagatgccaaggctcacacttcaggttaggcctgggtggggagcaattcccgcagtttgagacagagaactctggaagagaagaccaagtcctggagctccctccaggagggaggatgcgggggagggaggcatgattggtttggttttagttatgttacactagagacaccttttgttttttgtttttttaagacggagtttcactctgttgcccaggctggagtgcagtggctccagctcagctcacggaaacctccacctcccgggttcaagcgattctcctgcctcagcctcccgagtagttgggactacaggcacccaccaccatgcccagctaatttttgtatttttagtagagatggggtttcaccatattggccaggctggtcttgaactcctgacctcaagtgatctgcccacctcggcctcccaaagtgctggggttacaggtgtgaaccatcgtgcccagccaactggagatgcctttgagatatccaaaggtaagtggaagaacccagtgggatacaagagtctagagctggcctgagaagcccaagctgggaatgtaggtaggagtgtgggtaagcacagaagctgtgggcttgaaggagctcacctagggagaaaatatcaagggaggtaaggaaaaggcctaggatgaaactttgaccagcacaagcacttaatggccttacggaggaggctgagcctacagaactgtggccagagaggtgggagggtgtgtggtatgcagaaggccaggccgtcagatgtcaaggagaagcgagcaacggttcacagggttagcatagtgggctgaatggtggcccccacaaagctgtctacatgctaatcctaatccccagaacctgtaaatattaccttatatgggtcgggcgtggtggttcatgcctgtaatcccaacactttgggaggctgaggtgggtggatcacttgaggttaggagttcaacaccagcctggccaacatggtgaaatcccctctctattaaaaatacaaaaatcagccaggcatggtggcatgcacctgtagtcccagctactcaggagactgaggtaggagaatcatttgaacctgggaggcggaggttgcagtgagccgagattgagccactagcactccagcctgggcaacagagcaatactccctctcaaaaaaaaaatattaacttatggcgggtggatcacctgaggtcaggagttcgagaccagcctggccaacatggtgaaaccccatgtctactaaaaatacaaaagttagctgggcatggtggcaggtacctataatcccagctactcaggaggctgaggcaggagaattgcttgaacctgggggcagagattccagtgagccgagattaaatcactttactccagcctgggtgaaagtgcaaaactccacctcaaaaaaaaaaaaaaaattaccttatatggcaaagtgtgattattaaatgtcttgacaggaagagtttatcctggattatctggttgggccctagatgcaatcacatgtatccttataagacagaagcagagagttttaagagaaacacacacaagaggaagcagcaacgtgacctcagaggcagagactggaatgatgcagccacaagccaaggaatgcctagagccaccagcaaccagaagaggcaaggaatggattcccccgagagccttcagtgggcatgtggctctgatgatatcttgatgttggacttctggcccccagaactgccagggcacacgtttctgttggttgaagccatgcagggtgtggcaacttgtcacggcagccacagaaaactcacatggtcaggccctgctggaggtcacaggatggaagggcagaaacttgtccgtcgggctaaaagcgcaggcactgggggcttcagaggagtagttcttaaccccggctgcaagttaggagcacgggaagttctggccagttcccaaggcctcaaccccatctgaggtcaattaaagaaaaatccttggtggcaggcccaggtggaggactttttttaaaaaaacacgtagtcaagattgggaaccactgccgtagaggaaccgttctagaggcctgagtgagggtagaatccacatgggaataaggtaagaaagaagtggaggtaagaagaggaagaaggtttagactactctttcacaattttgcccctaaaggaactagcagccttggagggggcaggacgtgcatgtgggtcaagagaatggcaggctttttcaaaggggcatgtcttgggcaagtttaaacacccatggggatgattgaggctgagtgaaaggagttgcatgaggttactgggaaggtaggaggaagtcagaaagtcagaaggtcaaaccaggcctggccttggagcccctgagaacaggaggatcaggcagtgaatgggggcggtagtcacgtccgcttgtgggtgggactggtggggggaggtctgcatggctacttctggctaaagtatttattcatttatttatttgttgttgttgtttttttttttttgagatggagtctggctctgttgcccaggctggagtgcagtggcaagatctcagctcattgcagcctctgcctcccaggttcaagggattctcgtgcctcagcctcccaagtagctgggattacaggcgcccaccaccatgcccggctaatttttgtacttttagtagagacagggtttcaccatgttggccaggctggttttgaactcctgacctcaggtgatccacccacctaggcctcccaaagtgttatgattacaggcgtgagctgccttaccctgcctggcaaaagtatttaaatgccaattcaagagcccacctcccagctctgctttactctggcacaacaattggcaatgttcagagtggaatcttcccatctgcctggggccctgagtgatccaaggagccgaaacctcactggaggccctggagggacaagcagtatgaggtcaacctgggtctctgcagacccctcagacctgggggctgtttgttaccacagcagcacaaggtagcctctcctgcctcagaatgagcaaacacacctttctgaactcagccttgcaaactgtgataagaagcagaccaagtgctatgagataaagaaaaatcacactggggtgggggcaatttagaaagtgtgttgggaaaagatcacttaaagggggagttcgccagggagaagaaagaaggagagggagaatggctccaggcaggggagctgcgtgtgcttagtgtctgaatcaggaagcaggcggggagttggccagagtgcagagtgaggttagtggtgagaaatgaggccagggcaaagtggagagggggcagggagattgcagaggccgaagcaaagggttttccacccaagtgtgttaaatcggagagtcccctttaaaaaaacctttcccggctgctgtgtggaggacaggatggcaggaagccagaacagaagaccagctactgcgggagggaagatctgattgggatttgaataacatgcgggaagtactcaaggcagcgtcagagacagtgggtgctcagcggggcagaagccagacagtgccggggtgcagaagctaggggttcagggagctgggcaggaggcaggagcgcctctgggaagggggaaagcagagccagctgcccaccatgaccagtagcactcatcccttctcacggctgcctgagaagaggcccagacgcgtttcaggtgtggagcagaggcaggaagccacctccacaggtggctcaagctcaggcaggcctcctactgaattttctagaaaactgcaacacaccatgggaagtctgtcagcctattccagatgacaatgacaatggggtggcgaccccgctctcctgtctcctttcagggaaaagggtcagcagtggcctcaaacttttgagtatctactatgtgctagaccatctatatgcattatcttatttcatccttacaaccagcaaggtagagacttcactcccattttactgatgaagaaactgaggttcaaagaagtaccccaaaacagtcagtgatggagtcagaatttgaaccctagtctgattcttgagctcctaaccactctactgtactgcctctgtgggcctagcctcagacatcaataatacagaaataataataatgataaagcagctacctactgttttcagaccctttatctcatttaatccctaggcaatgtacatatcggcccatgttacagatggggaaatggacttgccaggctaagcccggagaagttcagtggcctgtccagagttacacaaaattgatggtggtagagctagggtggaactcaagtccctctgcctcagcccaagccctgcccacaggccacaccccctccctggcactcatgtcgagacagtgcctggcctcctgacctctccagaggggaatctcacgccccttcccactgcctttgctctctgcaaggctgactcacagccagcccagcatttgtctgaacagcaggaaatcctcccagcgctgatgtgaacaggaagcatcctcagttaccaacaaatatttactaagccccactatgtgccaggcaccgtggaggccctcgggaaatgcactaagtccctgctctcaagagatgcgtgccagagaggtccagggcggtgggttcacttacccaaggtcactcagtgtgtcggtggcagagctaccatgaggacccaggtcttggactcctgggacagatactcccagatctgactcatgtttccacgttcccaactgctggagggcgagcagggccgtctacctccaaggcaaacctagtcagattagttctccctggtgagccttggggacaactaatctgactgggtttaccttggaggtagacgccctgctcgcctccggcagttgggtttgcctcccaaacacatcgctctgttttgttttcgtctgactttttgggttcatgtatgtaacatgtctgtctccctcatgagccgtttgctgagaggggggaccttgtctgtgtcatcatgtcgtgtcctcagcacctcgcacagcacctagtgctctctgtgttcaatgaccacaccgttatttcctcgtttccctgtcccatgtcagcaatgctgggtgctctccctgcaacaaggaaggggctgacctgcccccatgggacctggcagaacccacacgggggcagaggagccagggctgcctggtcagctcacagaacctgagcaccgtggccagaacccagatgagccacaggtgcccactgccaatcgaatgtcccctccctccctagccctgcttttggtgatgagctgggcagtgccagggtcagtgacttatgccactatggcctctcaactgacttttagtgtgaggccaggagacagagcagccctgggctgagaaactgtttcagctccacttcctccaggaagccctctatgctcagcctcatctaggctccgccagctccgaggtacacagtggaagggactgagcagtccccacagtgtctcctgctgacggggcctgacagctctgctgctgagaggtttcacagaaggcaagatgtgtcttccacctggggaaattcctgtggagccacagcatagggactcagcacacttaaactcgttttaaaggcaacaagactgaggctcagagagtgggaggaccttgagttagaaagtctaatgcataccacagccaggaagctatttgactctaaacccggaggtctagcagcacgctccctgcatgccacatagcaaggtgctgggtcactgatgctaacatctaaacaggggccaggtgcggtggctcactcttgaaatcccagcactttgggaggctgaggtgggtggatcacttgaggccaggagtttgagacctcctcttcacagaggtggaagggaggaccagcgggggcaagtgtatcccaagtcccagctacttgggaggctgaggcaggaggatcgcatgaacccaggaggcagaggttgcagtgagccaaaatcgtgccactgcactccagcttgggtgacagaggaagactccagctcaaaaaaaaaaaaaaaaaaaaagtcactgaagtcacctggtacccaggactacttcaaggacagccattgttatggccaacatggtgaaaccctgtctctactaaaaacacaaaaattagccaggcatggtggcgcacacctgtaatcccaactacttgggagactgaggcagaagaatcacttgaacccgggaggcagaggttgtagtgagccgagattgcaccactgcactccagcctgggcgacagagtgagactctgtctcaaaagtcaaagtaggaccattaccaaccatgatgatgatgctgaccaatggcagctattgctgcagcacctgctctgagccaggcctgcacttggtgtttgagaggtgggtatgggtataattctcattttagagaggggaaactgaggcaccgtgaagttaaatgactcattcaagctcctctagctggaaagtgggaaatcaggactcagacccagagagcctgaccccagctggtgtccaagttcaaattccttgctgttctagctccctggtcactaggagtgcagaggttatcccccacaactgctcaggggcctgagaacattaagggctgagggcaagcctacccccaacaccttgggtaaatacagattccaacctcactctgcgcccacagcctgctcctctccacctccccagccagaccatggtcctactaccttgccccgccccagggggtaccacagggaccccttcaagacacctgagcaggtggacaagtctctcctggatcacagggcccccagccacccaggtcaagcccaccctgaggttgaatgcaggattgggaagctgcctggcctcccctgcctccctgtgtgaacacagaccacttcctctctctgatcctcccttcctcctccgaagcaaaaggcttcgatgaaactcagtctcctttgttcccctccaccaccaactgccatgtgagtcaaaatgggtaaggcaggctcttcctaggcacatttttgttttaacaggtggctctggtaactgaaagccactgcaagcccaaagaagtgcagctggtgggttttgtgtcaggaagacaaaaaggaggagggaggagggagattctgcagctggagaggcctcccagagtctactgcaacccccactccagtccccaggaaggaaacgcacccctgagggcctgctgttaccagccaggcactgtacaaaaaccaatcagcatgtcagtttccccaagaaccccaagatcttggttttgtcaccccattttacagagggggaagctgagtttcaggagttgtctacctgaggtaccctagctgctaagcggcaggcaggaattcaaccccagtacatctgaagcccagggctaatgcactggcccaccctgccaccctgattctaactcttccccccacactgccccctcttttttgcataaagtggaattggcaaatgagcaaagcaatgaacagcttctacttgagtgcaggcagatctgggttcaagtctagctctgctgcttgccagctgtgtgactttggcaagttccctcccctctctgagtctcagtttcctcataataagtgaagttaataataggacaggaccttcctcagagggctgacataaacattaaatgagtcactgtatgcaaagcaggacagcgcctcgtgcagagtagacattcaaatatgagacagaaaaggcacattgctgatttagccccaattcccctctgcatcagagagggacagtttagaaactgctgtcccttggccgggtgcggtggctcatgcctgtaatcccggcactttgggaggctgaggtgggcggatcacctgaagtcgggagttcgagaccagcctggccaacaaggagaaaccccgtctctactaaaaatacaaaaaattagccgggcatggtggtgcatgcctgtaattccagctacttgggaggctgaggcagaagaatcacttgaacctgggaggcgaaggttgcagtgagccgaggtcgtgccattgcactccagcctgggcaacaagagcgaaactctgtctaaaaaaagaaaaaaagaaagaaactgctgtcccagcctgtacctgttcacttgccagtctacagcttcaaggctctcagattttgtgtagccctggcaagtccctccactccctaagcttcagtttcttcatctgtaaatggggatgaagacccatgccttgtcaagtcgtccagaggattccgtgagataaaagttactagccgggcacagtggctcacacctgtaatcccagcgctttgggaagccaaggtgggaggatcacctgagatcaggagttcgagaccagctggctaacgtggtgaaaccctgtctctactaaaaatacaaaaattagccgggcgtggtggtggacgcctgtaatcccagctactccggaggctgaggcagaagaatggcttgaactcgggaggtggaggttgtagtgagccaggatcacaccactgcactccagcctgggcaacagagtgagactgcggcacacgcctgtagtcccagctacttgggaggctgaggcaggaggatcgcatgaacccaggaggcagaggttgcagggacccaaaatcttgccactgcactccagcttgggcgacagagtgagattctggcaaaaaagaaaaagtcactgaaggcacctggtacccaggactacttcaaggacagctattgttatgattattgtaacaggcatgtgatcagcactggcctccaggatgcagaatgcctgagtgcctggtgccacctgtgaacataggctgataagggccacccctgcaacccccctttccacttcttccagtgcccagcaggtgctaagtcaaaccaggtgggggtatgggaggcacacccgacagggcaaacttgacttgggcatcccctgacgatgaccctgcatggcaggcacacttgaatgggtgttcagagttctgagcgaaggaatccaagagtggccaacctggagatccagtcgttatctatgaggaacatctgagccccaccccattcccacgggacactgaccatacaggggtatagggaccgaggccctttgttttgggttaaatgaaggttactaggtggagatggttgggagaaggtgttaaatgaaaatgctacataaactgcatgatttgcaagtggttgcggttcttctgctcagtctgccgccactggactctcttccctgtgtctaagcccccagtaaaaccccgtatcttgtttgctacctcttccaaagaaggtagcctcttgaacctggtgctatatccattggagtcaataggggtcccgcacaacagaaggcagctgcctagggccttgctaagcaaagtgtgttcctggatcgttgacattagcatttcctgggagctggtcagcagtgcagcatcgcaggccccaacccgacccacacagaatcacagtgtgaacattaaaagtcaggccacttgagtgcagtttgaaaagcgctgccctgctctgctttcttctagctgaccaggtcccaggcctcagctggtggcaggtatgagaagctgaaggacacagcaaaggctcctgtctcaggaggtttgcacctggggcactggcacctctatccccaaaggcttctgcagaggtagtttaggaaagatggttagaggcatgggatttcgaagccagcctcccttggactcaaaccccagattggacatttcctagctgtgtgatcttgggcctagttaacctctctgtgcctggattaaataaaaaatgcagataatgtgtttagaacggtgcctggcacagaaacatcaacactccattagctgcagctagtaatgctaataattataactgtcatctgtccctcccacaagagggcagggagctggctctggtcacagtggctctgagattcacactccttcccacttctcctgccagctcacacaagttcctcctcacaatcatacaagatttgtcacgcctcaaacacatggcaggtaacattctaccttcactctcaagcatcaccttgtggccttgggactcaggacacgggacacccacataagcagctgatgttccatcctccaggtgtggacactgaggtcccaatagggaaaatgatctgccagcttgaatcagatgggaggactgagcaaggccaaaaaatggggataataatatgagcccctcccttgatgggctgttacagaagaactgcaaggatccaatgggtgtctgcaacaagtgctctagaagtgggccctgctgttctctccataactcccaacatgttcgcaatcaaggagcctttttttttttttttttttttttgagacagcgtctcactctgtcacccaggctggagtgcaatggcgagatctcggctcactgcaagctccacctcctgggtttatgccattctcctgcctcagccttctgcgtagctgggactacaggcgcccgccaccatgcccagctaattttttatatttttagtagaaatggggttttgccatgttggccaggctggtctcgaactcctggcctcatgatccacccacctttgcctcccaaagtgctgggattataggcgtgagccactgcaccccgccaatcaaagagctttgctattgccataggattcacatcagggtacagtgggtccccagcccaagggcagagggagcccagagcatttaataaaaagactgcaaaggggaggcgccaatcatgggccccagctccagtaagacgtgaaggaggcaggggtgggggtaggagggcttgtacagcacctcagtgcttccagcttctgacggggagtagctgagcattttccctgggctgggggcatcagtagtgggggccaggcctcaccctcctcagaaggtaggtgggctctccacagcctgtctccctcactgacacatgcacactcactggattctcaccggcacttttgtgatagctgtcatcatcattcacacctatttcttttcttttctttttcttctcttttttttgagacagggtctcgctctgtctcccaggctgaagtgcagtggcaccatcacacctcactgcagcctcaacctcctgggctcaagcgatcctcccgcctcagcctcctgagtagctgggactacgggagtgcaccaccacacacacttcccctaactttttttattttttggagagacggggtctagttttgttgtccaggctagtctcaaactcctggactcaaatgatcctcccgcctcagcctcacaaagtgctgggattacaggcgtgagccaacctcctgggccactcacacctatttcttagaagggtaagttgaggctgactgcagctgactccttccccaaccactctcacaccctactggctgactcaccctgcttggcagactcctgggcccctcctctcggactctgcgacaggccaagggggtccagaccctccctgaccccaacagtcccaagacgccacagctggtgggcggagaaacaaggggattctcccctggggccagtggccatggcttggcctcgagtgaaccctgctagggccccaaacccagggcctacctagctcctgttcttcccgcgcgggggaaggggggtgctctgctcccctccctcccctttctggcagggctcacggttcttccccggggcgcatccacaaacctgagctccttggcgctcaccaccataacgctggcgtacaaagctgcttccattcactgagcactcagtaggcgccgggcacagcactaggtgcctatccggcgtagacatcgggcctgatcatacagctgagcttcagagacctcaagtccctgcccaggcccacacagcgctcagcggtgctaggatgcccacttgacagacagcgaaactgagacccagaggggtcaagtcaggggcagaagcagactctggaggcctccgggttctggaccttctctgccccattgtccctgattagcccgcaagcaagccacggcctaagccgaaggaagaactcgcctgcaggagcccccgttcgttcccagggtttggacgccccgggctgggccccgctaagcccctcgggccgcccaggcgccggacccccgtccccggagcccccgcgcgcgctcactttgggcttgtcgaaggcgggcgtctgggccatggtgccctcgtgcgccccggcgctgctccctccgccgccgctcggtgggtctctgccggctcggtggccgctcggctttccctggggccagcggtggccgcggccggccacgctcttcttaacgggccgggccccgcctcccgccccgcccgccgccgttcccggggcccgccctctcgccggagcccccgccccgcccgccggcctggatcgcgcatttcctggaattctggacccggcgtcctcgcccgccgacccgaaaactacggccccgcggcgcccgaccggacccacctgtgggcgcgcgctccagccgcctcgctgggcgctgccttccccccggctcctccagcaactttcaagcgtccccctgcagtctgggcgctgctgtgcgccaggcccaagctagaagcggggaccccgggagcatcgcaagcctcgagcggcgtgccttccaccggatagacggacgctcgtcgcagaaacacacaccataattgtatagttaaggaactttcgaggggggccagccgtggcctgcagaacctgcaggagttcatcaggggtgggtgggggtggagaggacattctacgtgagagactccagggagctgggagtgaaaggaggcgaggaaggctggagctcggagggagggagaacacagacagtcccctcctgggcattcacctttaagaaacccgcccaggcgcagccagagacctgtgcagaatgttcacaccagcgctattccgaataacaggaacattggaaacaccctcaaatgcccctccacgggcgagtgggcaaataaaccggaatattcacaccatgaaacgttagacagcagtgaaacggaatgaacttcagccagacaacaacagaaacaatgtctcagaaacaatgttgagtgaaaaaaactaagttgcggaaaactgcatacaatggtgcaacttttagaatgtgtaaaagcaaaaccaaaagtatgtatgtttagacacatgcatcggtggaaaaaatgtaaagcaagggaaagatgagcatagatacgagaagagtggttatctcaggtgaaagggaaggagccgggaggaggtaaggacggagggaaataacacgcgggtacaggttatttatttatttatttatttatttatttatttatttatttatttactgagacggagtttcgctctttcgcggaggctgcagtgaagtggcgcgatctgggctcactgcaacctctgcccctctggcccgcctcctccccaccgctcccccgcacccccagcgtttcaagcgattttcctgtctcagcctcccgagtagctgggattataggcgcccacaaccacgcctggctaatttttgttttttgtttttttgtttttgtttttgtttttttgagatggactcttgctctgtcgcccaggctggagtgcagtggcgaaatctcggctcactgcaacctccacctcctggattttaagcagttctcggcctcagcgtcccgagtagctgggattacaggcgcgtggcaccgtgccctgctaagttttggatttgtagtagagacggggtttcaccatgttggccaggctggtctcgaacacctgacctcacatgatccacccacctcggcttcccaaggcgtgattacaggcatgagccaccacgcctggccacacacaggttattgataatgttccagtactggggtggatggtagcttcatttcatttcatcataaataaattaacaaacccataaacaagggggaaagagagagtgggagagtggagagcaaggggctagaaggtctgatgggagctgaatcctgccagggatgtgggacccagcgatggtgtgggattcctaggaagtcagtggagtgttttaagtggaggcgagacaaaatcacccttttatttggaaaaaatattctccagctactgaaagtgtgatccagggatcatcagcacccacatcacctgggagctgactacaaatgcagactttcagaccccatcccagacctactgaagtagaatctgtattttatacaaacaggacccccaggtggttcgcacccacagggcactttgagaagcctgggctccctgctgtgaggggagggcattacagggggccagcgggggtgagggaggacaggataccaggaaggaggcaactgccatggtctgggtagggcatagtgatgtcagtgggggaagtggagaaactcatattcaagctgcatttagggtgtaaaatcagctggatttggggtttggttgtatgtgggagtgagggagagggtggctgtattagtccattattttcatgctactgatgaagacatacccgagcctgggcgcagtggttcatgcctgtaatcccaggactttgggaggccaaggcaggaggatcacctgaggtcgggagtttgagaccagcctgaccaacatggtgaaaccccgtctctactaaaaaaaaaaaaaaaaatacaaaattagccaggcgtggtggtgtatgactgtaatcccagctactcgggaggctgaggcaggagaatcgcttgaacctgggaggtggaggttgtggtgagccaagattacaccattgcattccagcctgggcaacaagagcgaaactccatctcatgaaaaaaaaaaaaaagacatacctgagactgggtaatttacaaaagaaagaggctttaatagacttacagttccacaatggtggggaggccttgcaatcatggcagaaggcaaaggaggagcaagtcacgtcttacatggatggcagtagacaaagagagagcgcctgcagggaaactcccatttttaaaaccatcagatcttgtgagacttatttactatcacaagaacagcatgggaaagaccatcccccatgattcaattatctcccgccgagtctctcccacaacatgtaggaattatgggagctactagatgagatttgggtgaggacacaaagccaaaccctatcagtgggtctcatacattgtcaaagccaggggagttttttgtaagatcctttcttggctctctgtgttactcgggttcaataataggggctgccatttactgagacaggtttggagccaggtacactgggaagcactttataagcacccatcccatttcatctttacagtcatcctcagatgtaggaggtgttctcctcattttacagatgaggacactgaggttcagatagagagacagcctgcttggctcatgggttgtaagtggcaaaactggggtttaaatttgaatctgactcgagaaacttcactccccaccttattgcctccccagcctctcatgacattcaagtccctcttcaacatcagtcccaccacttcccaccacattgctgaaatgccaatcaacctagatgagttgctggttgcttaagggtgacacaaattatttgcaattcttcacattgcaagatggagtctaggtttcctcctcttggacctgggctggcctgagtgacttgttggagtaatagagcgtgatgggagcaagcttcctggatttccgagccttggtcataaagaagctttgtggtgtcctttggggcctcttgaacattctctctgggaacccaagcttctagaagagaccatcatgctaagagagtccacatatggccattccagttgacagtcccactgagcccaggcttccaccatccctacgaagacagcaatcatgttagcgaagctgtgttgggccatccagcccagctgcccactgaaaaccaggctttggtcaatgccatgtgggacagaagaattacccaagtaagcccagcccaaattcctgacctatagtattgagatatgtaatgaaatggatgttattttaagccattgtgttttagggggagattgtcacacagcagtaggtaacaggaatgcttgcttctacctgccccagccctccagcctctgcaccttagtcacttccatcctgacacctggaaaaccctttacccagatcctagactatcaaaattctgcattccaaatgggtcagatccaaagggccaggctgcgtgatgcagttcttctgtttgcccctgcaggtgcactctccacccttctgcacgctgctctgctcctctgtgtccggcagccatgctgctgtgggtgagaccaatgggctctcctgccctctggctctggttgggttttgtcaacagggagcaccagcaggagaacagcagatgagaggagagaggtcaggatattcattccccctttccctcggtgcacagtcactgggctgactgtgtctctctaccaaggccacatctcctgtcagtcctcctggcccacctctccataccctccccattccagattccctcttgcctattgattgattgattgattttgagacagagtctcactctgtcgcccagggtggagtgcagtggtgcaatcccagctcactgcaacctccacctcctgggctcaagcaattctcatgcctcagcctctggagtagctggaattacaggcacccaccactatgcccggctaatttttgtatttttagtagaaacttggttttaccatgttggccaggctggtcttgaactcctgacctcaaataatccacccaccttggcctcccaaagtgttggcgttacaggcatgagctaccgtgcctggcctcctgccgttttcttgaaaggcagtggttccctttgttaccagagtcccacgccacccgttgttgctttccttaaactctcctcgctaggttcaggtttccccagaagcagagcctgagacaaagatttcaatgcaagtagtttatttgggaagaggaaacatgggaaggatgtgggtgcgaaacaagacaggaaaggggaagaagctgacatgagcaggtcaccacactgagcacctggagctctatccctgggcagcactctgggagatgatgaatatgttgcaggcttaacccagcagaggagcgaggaagctggggaatctaactgccccctcccctctggcaatgcttccaggacattaacttcctggcactcttagtttgttcaacatgaccggctgagtttcttgcatggctagaaaatatttgcagcaatgagagagagactctgttagcagtaagtagctattgccatgtagaggtgattttgagggcatatgggcagctacaccagcccacacctatgtaaataactcccatattaaaccctcttcaattactcagtttgagtgtggcacctggttcctgccaggaccccgagtgatacaggctggtcttgagcttcttcatagcaatacagagtggaccagtgactacagaaagcttgagaggggctggagagagatgccttccccaatattcattatccacacagcacgccactcctgtgagaagacaacagagattgtgtatgtttgagaatgtctctctacctccaatgtagccctcctgaaaaatctagttcaagatctattccaggccaggcgcagtggctcacacctgtcatcccaggactttgggaggccgaggcgggcggatcacctgaggtcaggagtttgagaccagcctggccaacatggtgaaaccccatctctactaaaaatacaaaaattagccgggcatggtggcatgcacccgtaatcccagctactcgggaggctgaggcatgagaatccctctgggccacagagggagactctgtctcaaataaataaataaaaatcaagatcaaaatgtatatgatcaggagcctcagctccaccacttacagctctgtggctttgggaaagttgttttgagccttgattttctcatctgtgtagtggggataacatatacatactaattaataggataaaccatagacacgcctcgctcataggaggagaagaacatcctcacacaatgggagaggtggggattgtggaaaggagagagcaaatgcctcgtcaagatgctgctgtgctgaaacataaatccagtgttgccagatcctccaatcatccaaaaaagccggagacccatcttttaatgtttaaactgtattcaaatgtgtcctaatgtttaaaactttgtataagccaaagaaaacatctgtgggccagattttgccccacacagccaaggtccctgctgattctgatcttctaagatctctgaataagaaagaggacaagggacaggttgccctttcactcacatttatcagacaggattaggatcagttgcacacaacagaaaacacccaaataatagtggctgaaaaaagacagaagtttatttctctgttgtgtaaaaaggccagaggcaggcaatgccactgatgtgacaactctgtgaagatgcctccttctatctctctgctctgccatccctagcatccagcccctatcctcattgtgcagtatggctgctggggcaccagccttcacatctgcagtccagagagcagggctgaggaaaggatgcagcagctagtgcttgtctctctttttttttttcttgagacagagtctcactcttttgcccaggctggactgcagtggcactatcttggctcactgcaagctctgcctccggggctcacgccattctcctgcctcagcctcccaagtagctgggactacaggcgcctgccaccacgcctggccacttctgtcttttaaagatctagatacctggttttcctcacaacaaattctgcttatatagtcacatggccacatctaatcgcaaaggaaactaggaaatgtcttatacctgtaaggcaaggtacccagctaaaaaaaaggagattgtgttactaaagaagaggatagtaggcccactgcagtggctcatgcctgtaatcccaacactttaggaggtcgaggtgttcgatcacaaggtcaggagttcgagaccagcctcacgaacatggtgaaaccccgtttctactaaaaatacaaaaattagctgggcacggtggtgcacacctgtaatcccagctaattgggaggctgaggcaggagaattgcttgtacctgggaggcagaggttgcagtgagccatgattgtgccactgcattccagcctgggtggacagagcaagactccgtattgggggaaaaaaaaaattagaggatagtagatctagaaggctgctcatttctgccacatcaaatagcctggtaggtgaggagggtatatggataggtggaaagagtgttaccaggaagccagattctgctgtccatatcatatgtctttaagcctctttctgaccaggagaagaaaataagagagcaagatagaaagaggcctgagtataatcatagagacaacttaccaaggacctgttgcatgccaggcccagcactgagtcttgtgccaacattgttttagtccattttgtgctgctatagcagaatacctggaactgggtaatttttatggaacagaaatgtattggctcatggttctggaggctggaaagtccaatatcaaggtgctggcatcattcaagggccttcttgctgcatcattccatggtagaagatgagagagtccgagagggtaagagagggagcaagagattgatctcacggcctcaagcctttttatactcagcattaatccacccatgagtgtggagcccccatgacctaaacacctcccatgaggccccacctgccaacactgttgcattggggattaagtttctaacacatgcttgttggggaaccacattcaaaccatagcaaacatcatctcagattattcttttcatccagcctatccggtgggtgggcctcgtgttattgtggggtggggtcacatcttgcctgtgccagctggggtaggaggcctggacatccaattgtctcccagattgataaccaacccacccttctgtcttctgccctacctgacaccacttggtcttcagagatttctggtccctccaatccctgagcctgagattctgcaatttgctttgtcctaaaggctccccgtgagcagccaggtttcaacttcctgggtttcttgtcagtccccactcaccatctgccttccagcttccggaatttggttgattcttctcatctgctattttcttcctcatacgttttctttgtcccagtagatagatgtgcatttaaaaaaaaaatccctgtgtcattttcttggaatttcagagaacaatggagagaaataagtgtgttcaacctgccatgtttaaacagcagtctccagcctcagttcttgactgggggaatcctcagccctcaggaggattgtatggtatccccatccttcccccattccttccttatcctgctccaggagtccatgggagccctcggcacacaggactctcttccccactctctgaacctggggcatagttctgtcctgcctccatagcccatacctgcttctcaagagcaggggccttgtcttcttctctctacttcgacaggtctgggcaggcctcaggaagatagatatgagctcatggtgtgggtcattcctaagaagtcactttggactttgaggagttaaaattcaaagctggggatgagagtcaggcatttctaaattagaatatcaagtgtattcccactgtatttacaatggaggccagcatcaacactcaaggtgaaagcctgatagagtcacattggtccttgaaaacctcttaggaagatgccaggtggagacagaggcatcgtccctcactgaatctgatacagccagcattttctccggggcttcttccccatgtcttgagtaagtgcctgctggagatcctggtttgggttgagaagctgtgttatgtagacaaagtgcatcttcagatcctagaatcttcctcagtgggtcatgagcctcatgttgctcataggaaaagaggccaagaactagggtgaccaaccatcctggtttaccaggtctgagtagtttattgaaatacagagttttcagtgctaaaaccaaaacagtcccagggaaattcccaattgtggtcaccctacagaacaaccgtaacaacaggattacctctcacacaccctcctggacatgtgcatgttacacaatttgtccactttctgttgctgtcatagaacccatgggactgggtaattgacaaagaaaaggggtttgttttttacagttctggaggctgggaagtccaagacagggtggctggatctggtcagcttctggtgagggcctcgtgctgtgttgtaacacagcagaatgcatcgtagggtgagaggaagcaagagaaagccgaggaagcaagagaaagccgaggaagccaaactcacttttgtaatgaactgctctcaataactcacccacttctgtgagaattaacccactcctgtgagaaaggcattaatccctcctaatgacctaatcccctcttaaaggccccacctcccaataccattacattggggaccaagtttctacatgcattttggaggagacaaaccacatccaaaccatagcacacacacaacataaaatcgttatctcctacagtttaccacacccctcaacctccacgcccctctcaccagccttttttttaatacgaattcttgctgttgttggcctgggctggagtgcaatgacacggattcggctcactgcaacctctgcctcctgggttccagcagttctcctgcctcagcctcccgagtagctgagattacaggtgcccgccaccacgcccacctaatttttgtatttttaatagagatggggtttcaccatgttggcagggtggtctcaaacttctgacctcaggtgatccacccacctcagcctcccaaagtgctgggattacaggtgtgagccactgcgcccggcctcaccagcccttttaagggaaatagatggtagacttgttcggagagtgggctctggaactaggctctggaagcttcagttgcagcattcattagctgtatgtgtttgggcaagtcactttacctctctctgcctcagtttccttatctataaaattggaagaataatagtaagttctactctgtcaggtcattgtaaggattgaatgaattaatattatggagagcagttagaacagtgcctgtcatggaggaagctacacaggtcacaactccttaactgaaactccagtgtctcaggatcctgatgcattttggaatttagggagttttgggattttggaaagcacatgacttatataacacactagtgggtagtgggatctggcttagcatcccataacgaaacacattaatatttctgcagaaaacaatatacgagtattcatacatctgttcaggttaggttttggctacccaatgagttttggtgttacattattttgttcagaaacactgggatctctgaagtgtggataagggcttgtaggtctgtgtaaggttttgctattattattgttgaatgtgcatctgatataactgccatgcagttgcttcttgaggacaactctgagcttttatgcccaaggccctcctggactcttggagttttctagcagggccttcctgcaccaagagctctgaataacctttgaaggctgacaggacactctcttcttctctctctacctaggtcctcaatttagtgatgtctccctgttcctctcagtgtggtaatagaggttggcaggggaggggtaggttgcaaatgcaatctccaggagccttccccagcctgaccctcaccccctcaaccccagctggtcccagtgggggaggggcacaggttgtgtggaagtgatgagtaagcccctcttctggtgaagctattgtgggttcaggcaatcgtctggcctgcacaggcaagataatggagtcaaaggaggcttatggcccctcagccgcccctgggcatgcacagatgtctctatggcacacactagcacttgcagaaaagcattggtgccaggtgcggtggctcatgcctgtaattccagcactttgggaggccaaggcgggtggatcacttgaggttaaaagttcgagaccagcctggtcaacatgcaaaaccccgtctctactaaaaatacaaaaattagccggatgtggtgacgggcacctgtaatcccaactactcgggaggctgaagcaggagaatcacttgaatctgggaggtggaggttgcagtgagccgagatcgcgccactgcactccagcctgggcgacagagtgagactctgtctcaaaaaaaagaaaagaaaagtgttggaggggaacgagaaagttcccccttaattctcagccagtatttactgagtgtgaccctgggctgggccccaggctaggtgctggggacacacagtgaggaaaacctggcccctctgagataaacccacaggccaggggcagctgccttctgacattgggggtatggggctggccctcaccctgaccatggtggcaggtgcccacccacccttcaaagcaagaggagggagggagaagtgcctgtatgttcaagagttactttacaaggacaaatgggtccatcaccttggttgacgtcagcaaagaagcatcagccaaagccttgaggtgaccccaaaagactggggtgcaggttagggggttgagacaggctcagcatggagagaggagggtaaagctcctgcagaggccccagctcccaaagatgaagctaccgcttgatgatgctgtctccagggccagagatcttcctctcatcccgcactatctgcagtcctctctggtgtgtgtggggcgcagtcattagacccatcttccaggtgagagatctctgcctcagggctcagaggacctcctcctggggtttcagatcagtcttccaggatggaggatgggaagcaggccatcaagagttctggtaagaaatgaggtttctagtcaggtacggtggctgacgcctgtaatccaagtactttgggaggccgaggcaggaggatcacttgaggtcaggagttccagaccagcctggccaacatggtgaaatcccatctctactcaaaatacaaaaattagccaggagtggtgaagtgcacctgtagtcccagctatttgggaggctgaggcagcagaatcgcttgaacccagaaggcggaggttgcagtcaactgagatcgcacactgcagtctagcctgggtgacagagggagactctgtctcaaaaaaaaaaaaaaagaaagaaagaaagaaatgaggtttccctgactgagtctgggaagctggcattcattcgttctttcactcattcattctggctgatcccgagctctgacagttcctatctgcatgaccctggcagctcacctcagccctgagcctaagattctactatgtaccaggcactcttcagtctacttaggatacagaaggagccaggtagtcatgacctccagcctcatgacgcagataatggggtgggggtaggggcaactagcttattctggaggcttcctgtaaaaaacaacgcttaagtggaggtggacagaatctccccatcacgctggggaaaggcagaaatggatttagcaaacttactgtgaaagtcacagcttaagccttagagcccctcacttgccaggggccttccaggggcctgggaggggccaagtaatgcacactcaggatcacatgctttagtagaatttgccaatgtaagatgttttaactgtaatttattaagactgctgcccctctcactccaacttccctctctgtcatacttccccttcttttgggtattgccccagtgcttctggcattttgggggatctagctaaggagaagttgtcacggaatactgacattgatgaaaataacaaaagtcaaaatacaccactacaaaaaggatgtaatagaaagcatcaattcaaaaaaattttaagattagtcatcaaggaaacataataagtccggaaatcttacagctccgatatgaaagaaacttgatagaggttcttccaaatttgacaacaatcctagaattttatgaccttccagtagtccccccttatcctcgagggatacatttcaagaccctcagtgggtgcctgaaaccgtggatagtacggaatcctatttagactatgttttttttgatccaatagccaagacaactactaagttgacgaatgggcaggtagtgaagatgctggacaaaggggcaattcacacccctggtgggacagggtggggtagagtggggcagcaccaaatttcattacgctactcggaacagcatgcaatgtagaacttaatgaattgttgatttctggaatttttcatttaatattgtcagactgtggttgtccatgggcaactgaaacctcaggaagcaaaaccttgcagaagagggggctactgtaccagtaataagttgcaaagctgaaagaaactttatcgaccataagaaatttggggccaggcacagtggctcatgcctgtaatccccgtattttgggaggccaaggtgggagggtggcttgaggccaggagttcaagaccaatctgggcaacatagtgagactccatctctacaaaatcttaaagtattagttgcatgtggagacacatgcctgtagtcctgattacttgggaggctgagacggggagatcctttgagcccaagagtttgaggctgcagtgtacaaagatcagacaactgcatgcctgcctgggcaatggagcaagaccctgccttaaaaaaaaaaaaaatgggggccgggcacggtggctcacacctgtaatcccagcactttgagaggccaaggtgggtgaatcatttgagaccaggagtttgagaccagcttggccaacatggtgaaaccctatctctactaaaattacaaaaattcgccaggcgtgcctgtagtcctagctactcaggaggctgaggcaggagaatcgcttgaacccaggaggtggaggttgcagtgagcctagattgcaccactacactccagcctgggcgacagagcaagactctgtctcaaaaaaaaaaaaaaaaaagaaaaaaaaattagtcaactgtgctagagaaaagattaaagtatcttcttattctctctaaagaaaatgacattacaaaatcaatgtcacatgaagaggttaacgtaaaagtatacaaacacaatgtaggaatgaaataattatagatatgtatcatattgatgaaaatatgaatgtaaatgtaaattttaatttatgtaattatgaacaaaaatgtaatgctattatgtaaataaatatatttattatgttacatgtaacttaacatgtttaataacttattatgttatgaactgttgctgactatgtggccacaacaggggagggaatcttgggacccttattcagagagatcaagaccaaataaaggacctaataagtcatttccttcaacctgtcaccagtgcaggaatcctcttcctgatgacagctgtccactgagcctcggctctgtacatttcctgggatgaggaattcacccctcctccaaatcctgtactatcttgggtcaaaactctggttgtgggaagttctttagtcaagctgatcactagctgtcggtggtttccccttgggtcctcatcttccccagcacccccagaaatcatgggctgctgcttcccattttattatagctctgcagtgctacaatgcagctctagtatcttgccctggcctgggataacctgcccttcttcaaagtttccttttatgtcttgacttccaaagtcttcctcatccatgatcgcagagattgatcagccactcatacatatatgaggacgacaatgatgatgatgataatgagaacagctagccagcactgagtgcttactgtgtactgggctccgtgctgggtgctgtatgagcacctgctgttggtctcatgcacacctatttatgttggttttgagtaacttgtgcaggtatacctttgatttaaaattttggtttctatttagactacgataggaatttttgttttgtttagccttctctcctaagcttaatgaaaccacatattcagaaagaaaggacacatttaattaaaacatttcaaagacacacagcttaaaagagtgattaccctagacctcttacaaacaaatatgcccctcctccaaaactcttcttaatgtaaatttcagagaggaaaagccaaaaacaaaaacaaaatcgagaatgtgtgttaatttatctggctaaaacctgataaaaagattttcttggccgggcgcggtggctcacgcctgtaatcccagcactttgggaggccgaggcgagcggatcacgaggtcaggagatcgagaccatcccggctaaaacggtgaaaccccgtctctactaaaaatacaaaaaattagccgggcgtagtggcgggcgcctgtagtcccagctacttgggaggctgaggcaggagaatggcgtgaacccgggaggcggagcttgcagtgagccgagatcccgccactgcactccagcctgggcgacagagcgagactccgtctcaaaaaaaaaaaaaaaaaaaaaaaaaaaagattttcttaagagctctgtagttcaaagtcaacttaattaaaagcaggtattaagactataatttttaaaatagagcctttctgcttcttctattttggatcttgttttggggaattttttttcaggtgactgaaacccctcttttaattatatggtgagtccctctctctgttcgcttcctttcttgttggtgtgattttttgctgaaggaaaaaaaaaatgtaaaacttaagcagctttctggaaagcttaaatttattctctgtgctttgaaatgtaaatttcctaccttgtctaaaattcagtgaggtactcgcttcgcagcacatatactaaaactggaatgaaggccgggtgcagtgactcacgcctgtaattccagcactttgggagtctgaggcgggtggatcacctgaggtcaggagttcgagaccagcctggccaacatggtgaaaccccatccatactaaacataaaaaaattagctgggcgtggtggcacatgcctgtaatcctggctacttgggaggctgaggcaggggaattgcttgaatctgggaggtggacgttgcagtgagccaagactgcaccactgcactccagcctgggtgacagagagagactctgtctcaaaataaataaataaacaaataaataaataaaatgaaattggaatgatagagaaaagattagtagcatgtcacctgtgcaaggatgaaatgtaaattctgaagcgttccattaaaaaaaatatgttatttaataaaattaattaaggccaggtgtgatggctcacacctgtaatcccaacactgggaagctgaggtcaggaattcaagagcagcctggccaacacggtgaacctagtctctattgaaaatgcaaaaattagctgggcatggtggtacacgcctgtaagcccagctactttggaggctgaggcaggagaatagcttgaatccaggaggtgggaggctgcagtgagccgagattgtgccactgaactccagcttgggcaacagagcaagactctgtctcaaaaacaaacaaacaaaaaaatgaaaaaaaaataagtcacaaagggatcaaacttcattttggctactcctgctttggcgatggccacaaaagggaaaaagtttttcaaatttttttggtaactatgcctttagagttttgccaagctaaattaaactatgaatatttattgaagatctagatcatttccaaataagatataatgctaagacattaattactacatataagtttaagctcatatacttttggtttcttatttcagagaaacaaaagatatttaggggctgggtgtggtggctcatacctgtaatcccagcactttggaaagctgagataagaggactgcttgaggccaggagttacagaccagccagggcaacatagtgagaccttgtctctacaaaataaaaattttaaagttagccaggagtggtgttgcatgcttgttagtcctaactactcaagaggctgaggcaggaggatcgatcactcaagcctaggagtttgaggctgcagtgagctataatcacaccactatattccagcttgggcaacagagcaagaccctgtctcaaaaaaaaaaaaaaaagagatattaagatccgctagtaaaagtatcctattccacactgaaaaattgttccattagaaagcctgtgtttctaaatattataaaatgtgtattaatcaattgttagtacatagtgacaaaattacttctggctgggcggtggctcacacctgtaatcctagcactctgggaggctgaggtgggcagatcacctgaggttaggagtttgagaccagactggccaacatggtgaaaccctgtctctactaaaaatacaaaaaattagccaggcgtggtggtgtgtgcctgtagtcccagctacttgggaggctgaggcagaagaatcacttgaacctgggaggtggaggttgcagtgagctgagatcgcgccactgcactgcagcctgggtgacagagtgagactctaaaaaaaaaaaaaaaattacttcttagattttcagtataaattaagattactaagatttaaaattctgactaatatatggtaactaacactagagaccagaaggaagacaattctgtattcagaatatgtaaggaaagtaagacatctttttaggaaggaagattataagaaagacataagcatgtggtttttgttaaagagaaagtggttttgcctagtttagaggttatttaaaggctgtatgaaattgggataaaagaaggaaagaataaaatagattaactgaatggatatagaaagttgggaaaagaaagaggaatggaaaaattgtaagaagttataaaaggtttatagaaatattatctcgtgtggtcaaagctgattgagattagatgatttataaggttttattaaaattaggctttatatttataatgcattgatgcaaaagtagaatcatttttctattttgaactagatagtcacatagttttttttttgttcttttttttttttttttttgagatggagtctcgttctgtcacctaggctggagtgcagtggcgtgatctcggctcactgtgacctccacctcctggattcaagtgattctcctgcctcagcctcctgagtggctgggattattggcatgcgcctccatgccaggctaatttttgtattttgagtagagaaaaggttttgccatgttaaccaggctagtcttgaactcctgatctcagggtgatccgcctgccttggccttccaaagtgctgggattgcaagcgggagccaccgcaccctgcctcatatagtattaataagagatagcaaaagatttttttgtttaccttttgagtaaactgctgctaaaaaaaaaaaaaaggagaaaagaaacgggggagagggagagacattctgttggtctcaagttgtctttttcaggtcttttgtgtcaggcctctgagcccaagctaagccgtcatatcccctgtgacctgcatgtatacatccagatggcctgaagcaactgaagatccacaaaagaagtgaaaatagccttaactgatgacctttcaccattgtgatttgtttctgccccaccctaactgatcaatgtactttataatctccccccacttaagaaagttctttgtaatctcccccacccttaagaaagttctttgtaattctccccacccttgagaatgtactttgtgagatccacccgctgcccacaaaacattgctcctaactccactgcctatcccaaaacctgtaagaactaatgataatcccaccaccctttgctgactctcttttcggactcagcccgcctgcatccaggtgaaataaacagccttgttgctcacacaaagcctgtttggtggtctcttcacacagatgcgtgtgacatttggtgctgaagacccgggtcagagggactccttcgggagaccagtcccctgtcctcaccctcactccgtgaagagatccacttacgacctcgggtcctcagatcaaccagcccaaggaacatctcaccaatttcaaattgggtaagtggtcttttcactctcttctccagcctctcttgctacccttcaatctctctgtccttccaattccagttctttttcctctccagtagagacaaaggagacacattttatccgtgaacccaaaactccagggccggtcacagactcaggaagacagtcttcccttgccatttaatcactgcggggacgcctgcctgattattcacccacattccattggtgtccgatcaccgcagggacgcctgctttggtcattcacccacattcccttggtggcaagtcaattgcggggacgcctgctttggctgctcacccacattgcagcccagggctgctccccacccccttctccatatctctacccttctctttaaacttgcctccttcactatgggcaaacttccaccctccattcctccttcttctcccttagcctatgttctcaagaacttaaaacctcttcaactctcacctgacctaaaatctaagcatcttattttcttctgcaacaccacttggccccaatacaaactaacaatggttctaaatggccagaaaatggcacttttcatttctccgtcctacaagacctagataatttttgttgaaaaatgggcaaatggtctgaggtgtcttacgtccaggcatttttcacacttcgttccctccctagtctctgttcccaatgcgactcgtcccaaatcctccttctttccctcccacctgtcccttcagtcccaaccccaagcgtcgctgagtcttgtgaatcttccttttctactgaaccatctgacgtctcaccttcttcccagactgctcctcctcagctcgctccccaccaggctgaatcagcctccaactcttcttcagcctctgctcccacatcctataacccttctattacccgccctccccacacccagtctggttttcagtttcgttctgcggctagctctcccccacctgcccaacaatttcctcttagagaggtggctggagctgaaggcatagtcagggtacatgtgcctttttctctatcagacctttcccaaatcagccagcatttaggctctttctcatcagaccccactaaatatatacaggaatcccgatatctaactctgtcctacagtttaacctggagtgactgaaatgtcatcctgacttctaccctctccccagatgaacgggaaagagttttttctctagcccaatctcacgctgataaccgccggcttcatgaacctgacctccaggaaggcagtagagcagttccccgagaggacccccaatggaactatcaggcagattccccaggtatggctaggcgagattacatggtttcctgcctagttgaagggcttaaaaaggcagcttacaaagctgttaattatgacaaacttagagaaactacccaaggtaaagacgaaaacccagctcagttcatggcccgctcggcagcaacccttacacactttaccgccctagacccagaggggccagaaggccgccttattcttaatatgcattttatcacccagctcctgacattagaaaaaagctttaaaaattggaatccggccctcaaaccccacaacacgaattaatcaacctccccttcaaagtgtacaataatacagaggaggtagccaggcagcaacgcatttctgagttacagctgctcgcctccgctgtaagacagcccacaaccacgtctccagcatacaagaacttcagaacatccaagccacagctcccaggggctccttcaaaacatcctcgtggaccttgcttcaaatgctaaaagcctggccactgggcctcagaatgcccgcagcccgggattcctcctaagccgtgccctgtctgtgcgggcccccgctggaggtcggactgtccgactcacatcactgccactcctaaagcccctggagcccaaaccctatgttccttggccgactccttcccagatctcctcggcttagcagctgaagactgacgtagcccgatcgcctcagaagcctcctggaccatcacagacgctgagcttcgggtaactcttaaagtggagggtaagtccatcccgtttaatcgatatgggggctacccactccacattatcttcttttcaagggcctgtttccctcgcccccataactgttgtgggtattgatggccaagcttcaaaaccccttaaaactcccccactctggtgccaacttggacaacgttcttttatgcactctttttcagttatccccacctgcccagcttccttattaggctgagacattttaaccaaattatctgcttccctgattattcctgtactacagccacatctcattgcccccttcttcccaacccaaagcctcctttgggtcttcctctcatatcccccgaccttaacccacaaatatgggacacctccactccctccctggcaaccaatcacatgcccattactatcccattaaaacctaatcacgcttaccccactcaatgccagtatcacatcccacaacaggctttaaggggattaaatcctgttatcacttgcctgctacagcatgggcttctaaaacctataaactctccttacaattctcccattttacctgttcaaaaaccggacaagtcttacaggttagttcaggatctgtgccttatcaaccaaattgttttgcctatccaccctgtggtgcccaacccgtacgctcttttgtcctcaatatcttcctccacaactcactattccattcttgatctttaaaatgctttttttcactattctcctacaccccttgtcccagcctctctttgcttttacctggaccgatcctgacacccatcagtcccagcagcttacctgggctgtactgccgcaaggcttcagggccagccctcattacttcagccaagctctttcttatgatttactttctttccacccctctgcttcttgccttattcaatatattgatgaccttctactttgtagcccctcctttgaatcttctcaacaagacaccctcctgctccttcaacatttattctccaagggatattgggtatccctgtccaaagctcaaatttcttctccatccattacctacctcagcataattcttcataacaacacatgcgctctccctgcggatcgtgtccgactgatctctcaaaccccaggcccttctacaaaacaacaactcctttacttcctgggcgtggttggatacttttgtctttggatacctggttttgccatcctaacaaaaccattgtataaactcacaaaaggaaacctagctgactccatagattctcaatcctttccccactcctctttctgttccttgaagacagttttagagactgctcccacactagctctccctggctcatctcaacccttttcattacacgcagccgaagtgtagggctgtgcagttggaattcgtacacaaggactgggaccgcaccctataggctttttgtccaaacaacttgaccttactgttttaggctggctatcatgtctccatgcggtggccgctgctgccctaatacttttggaggccctcaaaatcacaaactatgctcaactcactctctacagttcttataacttccaaaatctattttcttcctcacacctgacacatatactgtctgctccccggctccttcagctgtactcactctttgttgagtctcccacagttaccattgttcctggcccggacttcaatccagcctcccacattattcctgataccacacgtgacccccatgactgtatctctatgatacacctgacattcactctatttccccacatttccttctttcctgttcctcaccctgatcacacctggtatattgatggcagttccactaggcctaatcgccacacaccagcaaaggcaggctatgctatagtatcttccacatctatcattgaggctaccactctgcccacctccactacctctcagcaagctgaactcattgccttaactcgagccctcactcttgcaaaggaactacgcactacgcatcaatatttatactgactctaaatatgccttccatatcctgcaccaccatggtgttaaatgggctgaaagaggtttcctcactacgcaagggtcctccatcattattgcctctttaataaaaactcttctcaaggccgctttacttccaaaggaaactggagtcatacactgcaagggccaccaaaaggcatcagatcccatcgttcagggcaacgcttatgctgataaggtagctaaagaaagagctagcattccaacttctgtccctcacagacagtttttctcctcctcatgggtcactcccacctactctcctgctgaaacttccacctatcaatatcttcccacacaaggcaaatggttcttggaccaagaaaaatatctccttccagcctcacaggcccattctattctgtcatcatttcataacctcttccatgtaggttacaagccgctagcccgactcttagaacctctcatttcctttccatcatggaaatctatcctcaaggaaatcacttctcagtgttccatctgctattctactactcctcagggattgttcaggccccctcccttccctacacatccagcttggggatttgcccctgcccaggactggcaaattgactttactcacatgtcccgagtcaggaaactaaaatacctcttggtctaggtagacactttcactggatgggtagaggcctttcccacagggtctgagaaggccatcatggtcatttcttcccttctgtcagacataattcctcagtttggccttcccacctctatacagtctgataacggattggcctttattagtcaaatcacccaagccgtttctcaggctcttggtattcagtagaaacttcataccccttaccgtcctcaatcttcaggaaagatggaacggactaatggtcttttcaagacacacctcaccaagctcagcctccaacttaaaaaggaggactctgtcaaggatacagcccaaaaactcaacaaccaagcaagtaattacgctgaacagccttgggcactctctaattggatgtcctgggtcctcccacttcttagtcctttaatacctatttctctccttttattcagaccttgtgtctttcatttagtttctcaattcacacaaaaccgcatccaggccatcaccaataattctgtatgacaaatgctccttctaacaaccccacaataccaccccttaccccaaaatctttcttcagttgaatctctcccactgtaggttcccatgctgccccaatcccactcgaagcagccctgagaaacattgcccattatctctccataccagccccaaaatttttcgccactccaacacttcaccactattttgttttgcttttcttattaatataagaagacaggaatgtcaggcctctgagcccaagctaagccatcatatcccctgtgacctgcctgtatacatccagatggcctgaagcaactgaagatccacaaaagaagtgaaaatagccttaactgatgactttccaccattgtgatttgtttctgccccaccctaactgatcaatgtattttataatctcccccacccttaagaaggttctttgtaaccccccccccgacccttaagaaggttctttgtaattctccccacccttgagaatgtactttgtgagatccaacccctgcctgcaaaacattgctcctaactccaccgcctatcccaaaacctataagaactaataataaacccaccaccctttgctgactctcttttcggactcagcccgcctgcacccaggtgaaataaacagctttgttgctcacacaaagcctgtttggtggtctcttcacacagacgcacgtgacattttgattgtttggaaaattcagtctcctctctatgaaagagtaaaagtttgctttttgaaatatttgaatcatcactttggctagatgaatgactacaattttaaactcactttgccaacacactgacattggcagagtgcaaagatggcaagaggctgggtccatggtgacactgttagggaaacaggagcataacagagtcagggtgacaccattttaaaatcaattgtggctgggcacagtggctcatgcctgtaatcccagcactttgggaggctgaggtgggcggatcacctgaggtcaggagttcaaagccagcctggccaacatggagaaaccccatctctattaaaagtacaacaattagttgggcatgatggtgggcacctgtaatcccagctacttgagaggctgaggcaggagaattgcttgagcccgggaggcagagtttgcagtgagctgagatcgtgtcactgcactccagcttgggtgacagtgtgacactctgtctcaaaaaataaaataaaataataaaataataaaatcaactgcatcttcaaactagcaaggcacattccttggcagtcacaactcatggccatgatatgttttgggtgaaggaagcgatttagtaatgcctgcaagggcaaactcctatggtggcagggtgtccagatatcctaatagcacataacaatatctgcttttgagataggtaaagtcatgctttgaagtatttcctcactaaaataccaaggataattttatttaaatcaacaaagcactaaattttcttttttcttttttgagatgctcactctgtcgcccaggctggagtgcagtggcacgatctcggctcactgcaagctccacctcctgggttcacgccattctcctgcttcagcctcccaagtagctgggactataggcgcctgacaccatgcctggctaattttttgtatttttagtagagacggggtttcaccatgttagccaggatggtcttgatctcctgacctcgtgatccacccgccttggcctcccaaagtgctgggattacaggtgtgagccaccacacccggcctaaattttctttaaaaaaaaaaaattattgtatttatggctgggcactgtggctcatgcctgtaattttagcactttgggagactgaggcaggcggatcacttgaggccaggagtttgagaccagcctgggcaacatggcaaaatcccatccctaataaaaatacaaaaaaaaattagctgagcatggtggcacatgcctgtagtcccagctacttgggaggctgaggtgggaggatcacttgaacccgggaggcagaggttgcagtgagccaaggtcgtgccactactctccagcctgcacaacagaaaggactccatctccaaaaaaaaaaaaaaaaaaagtatttatttatttttcatttattccaggcagaagaaacagcaaatgcataggtcctgaggcaggcatgcatttggcatgttggaaaacatgtggcactggccagaccaagcaaggccttggagaacatgaagagcagtctggcttttgctccagttgccacagaagtcactggaagaggcctcctctgagataagacactaagaaagcagtgtcaggccagttagacaggtctggacttgtcttctggagtcaaatgcaggcggcagacatttaaatggccagtcacagagagggtgatgggggccatgatgggtgacccacagggccgtgagagcacagaggagggaccctgccccatcctgagggcccaagggtccttcccaggggaagagagagctcagctgagacctgaaggctgcagcagagttagccagcttgaaagagaacgacaagggatgggatgggaagtggattccaggcagaggaagaagcaactgcaaacgcctgagaagagaaagcctggagcatttgggggaccagaagggggttaatgtggctggattgtagatgcaaacaggggttggcctggggggcaggcggcagcggctaggagggctctgcttttctcacttgatatactgtgaacatttttctatgtcagaaaggatccttctgctataggatttttaagggctgagcattacgtcgtggaataactggttctccagtgtcagacatttaggttctttctagtttttccctcttagaaacaatgctatgttgaacatctttgtctgtgcatctttgtgcacacgtattattatttctgtgcggtaaagttgggaagtctcggaggctacttggtggacaggattgagagctgccttggagaggcctgagtcagatctgtttgccagatcagcctccactgggtttctactggaggggccatacacagggagatgcagggagaaggcctgagggagagatagagagccctgattgtgagctgtggctgcccaggccagataatggcaggggagagaggaggccccgatcctgggcccctgtctgtgctgtcggcctggtgcgttagctcctggtgccttctaaagaggcaacaaaagtacttcaaattgagcatgagcttgggttcaaatcacacctctaccgctaaaaaactaagtgccgttgggccagttacttagtcattctgaatctcagcgtccttatctgtaaaatggggaaaataagccaatagggttattgtgaaagatacatgagattaatgagtcttggcgatagtccctgctcccagtaaatgacggcgtgcatttttattgtcatcttgggtctccatcctttttaaaaaaatacttgattataacagctttattgagataaaattcacatgccatacaattcacccatttaaagtgtacaattcaggcagggtgtggtggctcatgcctgtaatcctggcactttgggaggccgaggcgggcagatcacttgaggtcaggagttcgagaccagcctggccaacatggtgaaaccccatctctacaaaaaatacacaaattagctgggcatggtggtgggcgcctgtaatcccagctactcgggagactgcggcaggaggatcgcttgaacccgggagatggaggttgcagtgagccaaggtcatgccactacactctagcctgggcaacagagcaagactctgtctcaaaaacaacaacaacagataaagtgtacaattcaatagttttttatatatttgtcacaatcaattttggcactttttcattatcccccacagaaaccctgtacctatcagcagtcagtcctgcagccgacccccctctggccccaggtaactgccaattactttctgtctctatggatttgctctttctagatgtttcatagaaaagaagtcatgcaacatggggtctttttttttttcttttgagacagggtctccttctcttgcccaggctggagtgcaacagtgcaatcacagctcactgcagcctcgaactccagggctcacatgaccctccctgctcagcctcccaagtagctgggaccacagtgcaccgccatgcccagcaaatttttaaaaaattgtttgtagagatgggttctccctatgttgcccaggctagtctagaactcctgggctcaagtgatcctcccaccctggcctcccaaagtgctgggattacaggcatgagccagtgcgtccaggcctgtggtcttttatgactggctttgttcacttttttcatccctgtcagcaatgtatgagagttctgatttctctgattccttaccaacacttattattgtttgtcttttttattgtagccatcctcgtgggggtgtgtagtgggatctcattgtggctttgatttgcatggccttgacggttaatgtttctggtttttttcagtggaatcccctttataaattctgggacaccctattcccagtgtggaaacactaacctgttccaaagaaagaaaaaaaattctagatggaaaaagatgttcattactgcgacataacatttcttaatacaagtgactcgtctatagcagtaggtagttcctaatttttttttttttttgagacagagtcttactttgtcacaggctggagtgcagtggcatgatctcagctcactgcaacctctgcctcccgggttcaagtgattctcctccctcagcctcccaagtagctgggactacaggaacataccaccactcccggctaatttttgtatttttagtagagatggggtttcacaatgtggaaacactaggccacattgtgaaatgtggccaggatggcctccatctcctgacctcatgatctgcccacctcggcctcccaaagtgctgggattacaggcgtgagccaccgcgcctggcctattatctttaataattataaatactgggctgggcgtggtggctcatgcctgtaatctcagcactttgggaagccaaggtgggcagatcactggaggtcaggagttcaagaccagcctggccaacatggtgaaaactcatctctattaaaaatacaaaaattaccctgtcatggtggtgcatgcctgtaatcccagctactcagaaggcttaggcaggacaatcgcttaaacctgggaggcggaggttgcagtgagccgagattgagccactgcactccggcccaggcgagagagtcagactccatctcaaaataataataataattataataactataaagaccagctatcatatggaaaatgtccctgatgtgtgaacaaatgcaggatggaaaaatactcagtgtagtcattttagctaatatatatttgttaaaacatccaaatatttttttcgagctcggcgctgtgtgccaagctccatgctggctcatggacaaagtcaggaaaagaacaagcaaaaatgaaattccttcttgtgtcgggagtggtggggttttgggggacaggtatctccccttccccatgttttcttctcaaacttcctccactgttgttatattacctttgcagtgataaaaccaagagaacagaagaaatacttctggacctaaggatgaaagaatgatgggagaaacatttcttgagccagtccctttctgcgttcttattttgtggaatccgcacacatccccgagaagcttaataaaaagggctactatcatgacacttactgtgtgccttgccggttccacctgttaggtgccattgttgtccccattttacagatgaggaaactgaggcggggcaaggagatgcccttctgcttggtggtctatccttcagcattacccacacacatgcagagctacatataagctcacgttcacactcggattcacgtctgcacccatgggcacatggaggatcgcacaagccacactcagacacacatgtgtgctcacacacagggctgcccatgtccacaggtatgtgcatggggacacgcatgtatatatgtgcatattcccatatgcacacagcacaggtcaaacacttttggacacacatctgcctgagaatgggaaaaggggtgcaagataaaggggcaaagtctggcttttgcctcctccctgcacctgctaccagctgtgtgcaggactgggtggggcagaaataggtggctctgagctcagagggcagaggtggccttgcactagaaatccacctgccaaacttccaaatgggctacagcgactaaggggcctcacctgctgggcaaatcccccagctggagggtgtgctccagatcctccaggggtccccagggggttgagaagatgaggggcacacccagcagcccctaagggaggaagcgtggccatactggctaagggggcgcactcttcttgcaggccgcctgatcagatgcctgtaaaataagacagctttacaaagagggtgtcggaatgtgaggaggcagagggacaggcatgagtagaaagaccttcctcaggacctgaagtccaatgatcctggtcctgcgtcccactagctaggtgatattgaacaagtcacataacctctttgaacctcaatttcctcatttgtaaactttgcacaaatcatttctttgactgctaaacaagtatgttttgaggaccaacgacatgccaggtacggtgctgggcactgggaaaacagcagcaagcaacacagacatgggcttgccgtgtagagcctgcagaattagggaaaggataaatggaaacatctcacacatagtaagtgctcagttacgttcctcctggtctctcttttctaccattgtaaaggcgatgcaataacatagaaagttgggagaatggggtggcggttgctgaggggggaactctgtcatccagaatcccaccaccccaacacaatgactagcttcatttttgccaatttcatcagctcatgcaggggttgacctgctgtagggcactcaaaatattcaaaccaattaatgcattgcatttgtgatcagaagaaaaaagctaattacaatgtaacagatttacctgatgcaaagcaacgcaagcatggccatccctctgcatatatggaagcttttccttttgggggaaacagcaatatttccattttacggaaaaagaaatggaggcacagagaggtcaaggcacttgcccaaggtcacacagacagaaatgcgaagagcagctccagaggccagaactcctgcccatcctgtccaggactgtgggatgcatccagggacggacactggggctgtgggctggatgacttggctgcctttgcattgattggagctgtttagggaacctaccccagccactagcatccagtcctagagacacagaaaattcactggccagcctcacttttgagcccagaaaccccttacccttcctcctgcctcttgagaggccagtgttaggtgttagccggggtgcaaagctctggaaggcaggtttctgctttctgctgccctccagtgggcaaagaaagcaaacctctggatccatctggaagcaggtagcaggtgttgcccaagtcagctgcggctaatagtaataataatggctgccgctcaatgagcacttaccacgtgcagacgtttttacacctaatctaatgtaacctaacccctttaagcaatttaattaacatttaattcctctctcaaggtaggaatcacttcctatatacccatttacatacataatctgagacttagaaaaatgacttcccaaagtcacaaagctggtcagtggcagagccgagagtgcaagtccttggagatcagaggaggaagagaccatgatcctggaccaggagacagccctgcattcttgggcacagaggtgaatttactgtgaggctggtgacgcatcagggctcctgacttgcatgtcctctcccagggccatggaggaactttccaacgcattcgcatgggcatatgtttcacatttgcaaaactaacacatttcagttgcaattggctgagaccactatctctctccactgcctagaataatgtcttcacatagtaggtaataaatatgtgctaataaatccattttgtgtttaataaatcatgttgaatgaatgggtagagaaatgaaggaaggaaggaagtggcatttagttcaatcttgaaggaagggcaggatttgagagagcgttcctcatgtagcctagtgggcccctccacacacagaccatccaaggccatgagtggccttgaatgccagggtgaggaatctggccttaggtggtaggcactggggagccatggaaggttgcagagcagaggaaggatatgagtgtaattgtcaattaggcaagagttgaatgtcaaataagaggacagggccctacagcggggggccagagtggctcagataaaactcccctcatccagcaccacacagagagctggtgctcagccagtgtgatcacagaagcctctgctggggtgtctataagctccctggaagaagatatccaaatgctttgcatgtgtggctttgtgtatgtgtgtgtgtgggggggggaggggaggtgctgagtgtggatttgctcagcactctagtgtgcccagcccaacgtgggggaaaggtcaaggccctgtctggcttaggcagggagttctcagcattgcagtatgactgagcctctggctggaaagtaagggagccaagagaaaacaggtttagaagttggctaggcagaagtggacctatgaaattccagctgcaccagctgcttcttttgctaagctcccgtcatcctttctctctctccactgggtctttctgaatgtcaagaatcccagccactgtttagttagcacttgttttttgccacactctgtgaagcaccttcaagcccgatcaccggattattcctccaacaacgccgagagtgagaagaatggctattatttcgattttataggtgaggaagtagaaagcccagagaggtgaagttgcttacctgaggtcacataggagtcaatggtatacgtgagatcaaacccagactccagaggcagcccccctcagtcgccagccgtcctgcctcctctcctggtctaagctggggaggaaaaacccatcttggccagcagggggcggtgtgccctcaaggataagccctgcttcccagaactcagacagaatttgccagcaagacaacagcacgattctgaaatatctggctttgagccctcatttagtcccaactctggtggggcctggagaacggggagaggggtgagagaagtataaaatagccctcaaattggtgagccaatggttcacagaaaggaaagcgcagcggcattttaacatataaaaagattctcattttcactcctaggaagagaaacgtgttaaacccacaccacctgagcaggcactgttttgctatcaaactggcaaacttatgcaggtggggatatggagacacactccttcttacattgttggtgggattaaaacttggttttggccaggtgcgatagctcacacctgtaatcccagcactttgggaggccgaggagggcggatcacctgaggtcgggagttcaagaccagcctggccaatatggcgaaaccctgtctctactaaaaatacaaacattagctgggtgtggtggcacacgccagtagtcccagctactcgggaggctgaggcaggagaatcacttgaacccaggaggcggagcttgcagtgagctgagatctcgccattgcactccatcctgggcaacagagtgagactccatctccaaacaaaccaaaaaaaaaaaaaaaaaaaaaccagaaaagaaaacttggtttaacacctatagaagctaatctggtaacatctatcaaaattaaaaatgcacatatctaacaggtatgcatgatacattcatcaaaagacttgaactagacctgcatgatctgatgtggagccacccaccacatgtggctgctgagtccttgaaatatggctgatccaagcctggctgacatggcaaaaccctgtctctactaaaaatacaaaaatcagccaggcgtggtggcacgtacctgtagttccagctacttgggaggctgaggcacaacaattgcttgaacccaggggcggaggctgcagtgagccaagatcgtgctactgcactccggcctgagcagcagagcgagacagtctcagaaaaaagaaagaaatatggctggtcaaattgagatgtgctgcaagtgtgaaatatatatgggattttgtatactaacaaaaatgcaaaatgactccttaataacttgctaatattgatgatgtgtcgcaataatattttggatagattggattaagtaatttttatttttgttttttatttttttgagacggagtctcactatgtcgcccaggctggagtgcagtggcatgatcttggctcactgcaacctctgcctcccggattcaagtgactctcctgcctcagcctcctgagcagctgggactacaggcacctgctaccacccgtagttaattttgttttgtatgtttagtagagatggggtttcaccatgttggccaggctggtctcaaactcctgacctcaagtgatctgcccacctcagcctcccaaaatgctgggattacaagcatgagccactgtacctggcctgggttaagtaatttttaaaattacttttacctatttctttttcttttttgaatgtggctgctagaaatatacatggcttgcattgtggatcatattatatatttttacctttttattgtggtaagatatgcataacatttaccatttggaccatttttaagggtccagaagttcagctgtgttaagtacattcccattgttgcgcaaccatcaccatcatctacccccagagcgttttcatcttcccaaactgacactctgcctctataaaacaacaactccgcttgctcctctcctcccagcccctggcagccactattctactttctgtctctgtgaactggactattctaggttgcctcatacgggagaaatcatatacaatttgtccttggttgctggcttatttcactcagtatagtgtcttcaaggttcacgcatgttgtagcatatgtcagaccttccttccttttttaagactgaataatgttccattgtaaggatataccacattttgtttatccattcattcactgatgggcatttcggttgtttccacttttggctatggtgaatagtgctgctgtgaacattttggtacaaatatctgtttgactcatattttcagttcttctgtgtctatcatattttattggacaggactatgccagtgatctccatagccacataatttgaaatatccctaaaccaggaactacccaaatgctcatcgacagcagaacggataaattgtggtatcttcatacaatgcaatactccagtgagaatgaaaatgaatgaacaactacacacagcagtgtagatggaacttgcacacatatgtgtcgagcaaaagaagccacacgcaaaataatacatattgtgtgattccactcacaaaaagttcacaagaggcaaaactaatttatgatgttaaagtcaggatgatggctgctctttgggggccatctgggggcttctctggggctgacaatgttctggacaccatcttcaggagcgtggtcactccgtgaaaattcatcaagctaagcacttgggatttgtgtgcaactttgtgtataagttagacttccataagaaattccaaaagatgctttgatccagcaattccactcttaggaattaaacgacagatatattttcatatgtgtgaaatgaggtgtgtacaagattatccactgccgtttttatcagcaaaagattggaaacatgccatctcacacctactaggatgactactatttttaaaaaatgaaaataagtgttggtgaggatgtgaagaaattggaaccattgtgccctgttggtaggaatgtaaaatggtataacagccacggaaaactgtacagcagttcctcgaaaaatgtaaaataaaattaccttatgatccagtcattctgcttgtgggtgtgtgcccaaaataactgaaaagcagggtcttgaacagatatgtgtacacccgtgatcatagcagcactattcacaatagtcaaaggtggaagcaatccaagtatccaacaatggacgaatgaataaacaaagtgtggtctatatgtaaatggaatattattcagccttaaggaggaaggaaattctgatagatgctacagcgtggatgacccttgaggacactatgctaaatgagatgagccagacaagaaggcacaaatactgtattattccacttagacaaagtatctgtctaaagtaggctggatgcggtggcttacgcctataatcccagcactttgagaggccaaggtgggcagaccacctgaggtcaggagtttgagaccagcctggccaacatggtgaaaccccatcttaactaaaaatacaaaagttagccaggcgtggtggtatgtgcttataatcccagctactggggaggctgaggcaggagaatcgcttgaacccgggaggcggaggttgcagtgagccgagatcgcgccactgcactccagcctaggcgacagagtgagatccgtctcaaaaaaaaaaaaaaaaaaagtagcccaattcatagggacagaaagtagaatggcaattccaggagctgggaggagggggaataggatgttagtgtttaatgggtacagagtttcagttttgcaaggtaacattttggagaggtttggtggtgatggttgcagaacaatgtgactatatttaatgccacaaaactgtacacttcaaatgattaattagctaatttttggtttttttttttttgagatgaagtctcgctgtgtcacccaggctggagtgtagtgacgtgatctcgactcactgcaagctccacctcctgggttcatgccattctcctgcctcggcctccctaatacctgggactacaggcacctgccacaacgcccagctaattttttgtatttttagtagagacggagtttcaccgtgttagccaggatggtctcgacctcctgacctcgtgatccacctgcctcggcctcccaaagtgctgggattacaggcgtgagccactgtgcccttcctaattagctaaattttatgttatgtatattttgctgcaattaaaatttttcaagtgaggtatctataaggaaaggtgagaaaatatgtaagatacaaagataataaaatccagagcaagaacagtatataagtcctgtttccttatgttgaaatatatcaaaatattcaacagaagaccccaggataggaaagatgtgaaattctagactggatcatcaggtccgacggatttacaaagaaggtggccgaggatctctctccccagccttcaccccctcactgactgtgggaaaataaagggcttggggtttggggaggaggtgttgcaggaggagcggcagctccagctatgagacctcacccagagggggccaatactgcccctccagatgccaggcaggggacatggaagggtttggggattcgttgtgggctggggtgggggtagcttgcaggggtctgcttgggtcttgttccctagggcctcctggagggtggagtggtcttagcagcaagaagctggagttggatgttggattcctgagggccgaggaaggacttgcaagggacctccagaaggagaagtgcatcccccccagggtcaagagtgagggagccctgcagcaatggccatctgtgggacatctgtgacactgtcagctggaagccagcaggatggcggcagctcaagtgagacccttcccctccccttactatctccacagcccccacttgtgggggaggggaggaggtccagagaaggagccccccaaactgcctccccaggacaggccccagctgggcaaggggagaaggtttaaacctagatccaattgggagtttggattaatagcttgactggacattttaaatttgagttgagaccatgtttgtgacttaaagtgatggtagaactgtcttatgtaagaattggggccaggcacactttgggagtccgagacaggtggatcacttgaggtcaggagttcgagaccagcctggccaacatggcaaaacctgcctctactaaaaatacaaaaattatccaggcatggtggtgtgtgcctgtagtcccagctacttgggaggctggggcagaagaatcgcttgaacctgggaggcagaggttgcaacgagcagaggttgccccactgtactccagcctggatgacaaagtgagtgagacttcgtctcaaaaaaaagagttggtcccattctccagtgggctagccttggcttgtctcatggtggaggaggctggcgggggtgggtcaggttcaggggggtgggggaaggtggggagcagagggtgggagagagagagagagagagactgcaaggactgcattctttttgaggctcaggctcagaactagcacaaggtcacttccaccacattcaatggaccaaagagagtcccaaagccaacccacattggagagaacgaaggcaaagtcacattgcaaaggggtgtggaaacagatagtggtgcagaatctggcccgctttcataatcagtccactggaagactttgttttcctcgcaaggaaggttggaaatgtagactcactgcttgtccaggcagaagaggaaatgagttcagggaagagcttgccagtccccagcctttgcccagccccctactcatgcacatttaggcacacacctactgtgtgctcagcccagcagggtagattagagagagcgagggcgtcgggatagagggcctgattccccaaccgggtgactatcacttccggtctcatgacctccatgttctcatctgtaaaatggggataaacatcctcatcatctctcctgccattggtatggtggtgacaaaaaacactttatcgattcatgaaagtcatcagacaaagtggatgatgctgtccctgccctcaaaggtgttaaataaagaagatgagaattcaatacatgtccccagctctggtgagactgtaggggttgtgttaacaagggagggagagacatcagagagctgttggcaggggagagccctgtggccaagccttgacagatggtgaacagaatctggaaagacagagggcatggggcatggcagggtgtggaaacagcacacttgcaaaagtgtggaggctggacacatgtgatataaggcagggtcccctaccccatgattcaaagcagaaattcgcaaagactttgatgtaggctgggctgggagttgactacacttgcatgcctgttgcttggcaggatggctttcaaaaaagaaaaaaatataataatgaaagattgaaaacagattattggggagaaaagtatcccaggcgctagacggctgtctctgcagcctctggctcctgtcccacccattccccggccctgacgcaaggctggctggaagaaggtgttctcgagattgttcaggctgagggcctgactggcaggagactgaagcctaccccattcctgcctgggtgccaagctctgcatgaggtttaaatatacccacagcctgacactatgccctagatcatgctaaatgtttccatactccttgaattctcttctcaaggttcatttattgtccccatttttcagatcagtaaactgaggcccagagaggttaactggtttgcccacagtcacacagccagacaagtttgagtatgtctgattctattgccttattccaggtttgggatacaggcagagtagggagaggtttaggatggtaaagaagaatgttccaggaggaacagagttagtgtaagggcagtctaatctagagtcagaatttggagctgtttgttacagcagcatgacctagcctatcctgactgatacaaatcatggtaaactaatttatatgtcctgaaaaatattagaacttagcatctacctcttaggagagcttttttttttttttttaacttttacattttggcaaaacacaccgaacataaaatttaccatctaagcaattttaaatgtacaatgcatggctttaagtacattcacattattgagtttctatcaccatccttccacagaactcgtcatcttgcaaaactgaaattctaaacccattaaggaaacttctcatttccccctccccagcccctggcaattccactttctgtctctatgaattggactacttttgacagatacctcctataaatggaatcacacagtatgcatctttctgtgactgatttatttcacttagcataatgtcctcaagcttcatccctgttgtagcatgtatcagaattgccttccttttttaaggctgaaaatcttccattgtgtggatacactatattttgcttatccactaatctatcaatggacacttgagtgcctttcaccttttggctattgtgaataatctgctatgaacatggacacacgaatatcagaggcagccttttcaagcaaagggtttttggggaaaaagccactgtccaggactctaggcttggccactaacttgctgtgtagctgtgggcacattgcttcctgcatcgtgtatggcaattctaactctctccaccttcactgcctactcacagccgtgtgctggggaccagattagaccatggactatgaaactctcagcaaagaaaaagccacgaggggctgttattgttattactcagtggggtcagggcagtggcttcccaaaggcatgagtcactcatggtggaattccagacatcaggagggccgttctgggcagcagagcccagattccagacagagcagtgaccctgacccggagcccctaggggagccacaccctttctctttggccactggctgctgtgaggaaggagtcagtgaatgtcataatcatatgggcacttagggtgagagcctccagtcccactgcctcacgtaactatttaaggaggctcagaaagggtcatgcacttgcccagagtcacacagctagacagtggtggaagctggcctgggtcagatttggacatctacagaagcccttctcctccctgctcgcacccctcttagccccagcatgtgaggaaggcagctgtctccctgagctccgtccttctatgccttgggtttagccatgttgactgctgtaacaaataactccaaaacctcagtggctttgcattataaatgcttggttctttctcacatcaaactgcaataagtcttgacaggagggctctgttttctgcaggtcatatagggattgagacttttcctatttgtggctttcctcattctcagagtcctctccattcagcaggcagatggcagaaagattgtgggtagaagatttttataagccagacctgaaatcagtacaattatttttgcttacatcccattggccagagctcagtcacatgaccacatctaactgcaaagaaggctgggaaatgtatcccacatgtgtgcccaggaagaagaagatggctattggtgagccttggtagtcttccacaagaacatgacccagttctggccaataaaacataaagaaagtatgctgggacaggaggtttgagaagggctggcctcaattattatataaaaaggggtgtggggaaggtcccctattctttccctttaagtggttgcatgaggatgcgatgtctggaactttggcagccatgttgagagcatgacgggccaagcctcagggctacagccaatatactgagggtgctgaagccaaaatgcgggtcctagatgacatcactgaacctctgaatgaaccaaaactggagccacgtaacctccagatttcttgactgcgaaggcacctattattgaattcaggagtaatagggtattctattacttgcagcctaaaacatcctagctgattgacactcaggtgcaaatgctgaaaacagctaagaggacaaggttaagccatgccagctgttacaacgaataactccaaaacctcagtggctttgcactacaaatacttggttcccttgaaacccctcctctgcttgaagttaggtagagccaagtaacatagctttggcctactctggatgttgtgcttttttggggaagttggggacagagcagcagttcaagcacaaaatgacctggctgctttgtgccaggtcctttatacacacagtgtatacacgggagcaaaatgcctggactcaaatcttgagtctgccacctcaccagccatgtgaccttgggcaaagtcaatcaacctcactgagccctagtttccccattgaaaacattggggtgattataaatattctacccacagagtaaaggattaaatgtccaattcagataaagaacttggcacattatctgtaaataaacacttaaaagattctgaccagagcctggtgggatgtgagtaatatcaaccccaccttagagatggggagtctagggttcaaggaaatgaagtccaaggacatataaataataagagacagagcctggattttaatacagacctaattgaacacctgctatgtgccaggcattgtgtgaggtgtttagatatattatcccattgaacatactagcaatcctgcatgggaggtattattattatcattattgttattcctattggacaaatgagaaagccaaaactcagagaagtgaaaagacttgcctacaggccaggtcaagatgcagtacttgaacctaggctgagtccaagcctttattctttccaccatgtataagcctccctaacagaagcccaccagactattatagtggaattgtaggcatcagaggagtaatacatttggctcccatggctattcagggttccctgaagtcatccccaaaagctggctgccagtccagcctgtcaccaaggttgtcctggtgatggctttaccctcactcctccagtagaataactgggccctggagtggatggtcctgagggaggaagtttggctcacttgataaagcagaactttcaaacactttgagctcatccatgatggaataggctgccttgggatgcgatgagttctgtggtcctgggaggatacaagcagagaaagtctggtggccacctgcaaggaagattattaagacagttactgcatagaaagtgaaattagattcaaagacctttcaggtttgaaatctgtggttgcaagattctcaggtcccattttctcagattccagtctaagattacatgatactcaaaatccaggaatctaaggctgcacgagttttctccttggattttttgttccctatttaggcagttagactgcagaacatctactgactcaggaaacagatgtgttagtaaaagcagagaatacatttctgggtttcaaaaacaccccttcctcccaggaaagaacattcctaagagacttgggcatcttgaacacctaatgaatctgaaagaggctctcactttctgtgactgtctttagggactgtccacaaatactctgtttcttttccttttagggtgccttagtctgttcaggctgctacagcaaaacatcttagactgggtaatttataaacaacagaaattcattgctcacagttctggaggttgggaaattcaagatcaaggctccagcagactcagtgtctggtgggagcctgtttcttatagatggtgacttctgtgtgtcctcacatggcagaagggacagatgggctccctcaagcctcttttacaagaacactaatcccattcatgggtggagccctcctgacctaatcaacttccaaaggccccacctcttaaggctatcactgtggggattaggtctcaacatctgaactttggggaacacattcagaccacagcacaggcccatagtaggatttccacttgaactccctcctctgcttgaagttaggtacagccaagtaacaagctttggccaatgaaatgtgtgcagaagtgaagtgtgccacttcctgggggagactttaggagccagtctgtggcttgatgctttctcttgccctctgctgtgcaacagttgaaatggtggttgttctatcagctgggatccaggagcaaggagacacagagcagcgcagcagctgcccagcaggggacgtgcatcaggagccactgagaaacaggacttgagcgttgctgttactgtagcagaactcaccctaccctgactgatgcacagctctcccctcccctccctccttcctcccatctaagaaggctgggaaggaggtcagagaaaaagctatgagtgagcatattttggattttgttggtcagtgggccccagagagctttgaagaattcagaagcagagagcagggaggatctcaagagataaaatggccaagagggccagagacaacctcacgcctagatacaattggggaaaaaaaatgaatggagctgggaaagtgatggggttggggaaaaaaatcccaattgaataagatgaattttctgcccacatatggaatggagcattgaaatgagaatgaatttaaaatagattacatttccagcccatctgaatttcagactgagaatatctgctgcacataattcaagatcccacagtctcaagaggcttgggtcctgggctttgacaatgactcttttcctgggcagaaggttgtacatggacactgggagcacctaggcctggaagctgggagaactaggctctcctgtctgatgtcactttccctgtcactttcccagggaggccttccctgactgcctgacttaaaaggaacttcctctaccaccctggccattctctattcctcttcttaacatcaattgacacaccacaagttttcattttttttttttttttttcttgagatggagtctcactctgtcacccaggctgcacccaggctggagtgcagtggcacgatctcagctcactgcaacctccacctcccaggttaaagcgattctcctgcctcagcctcccgaatagctgggactacaggcacgtgccaccacgtccagctatactgatgtgtttattgtctatttccccacttgactgtaagtttcaaaatggcagatattcctctctctctctctccctcttttttcttttcccttttatttataaaaaacttcaaacatacagaaaacctatcatgaagacccatttaccgcttacccatcatctagatttccaactgttaacattttactgtatttgcatcatgttttttggtgctggcattttctgaagtatataatattcttcactatatttccttttaaaaaattgaagatggccgggcgcggtgtctcacgcctataatcccagcactttgggaggcggaggtgggcggatcacgagatcaggagatcaagaccattctggctaacatggtgaaaccctgtctctactaaaaatacaaaaaattagccgggcgtggtggcgggtgcctgtagtcccagctacttgggaggctgaggcaggagaatggcatgaacccgggaggtagagcctgcggtgagccgagatggtgccactgcattccagcctgggcgacagagcgagactccatctcaaaaaaaaaaaaaaaaaatgaaggtaaggagttttgtctgttgtattcactgccatattactcactgcctggaagttggtaggccttcagcaaatagttgctgagtgagtagaaggcgttaaatcctcatgacaaccctgtgcggtaggtgttattatcccccattttacagaagaggaaactaaggcacagagaggaaaagtaacttccccaaggccacatggttggcaggtgatgaaagggggatttgagctcaggcaggctgagttcagagcccatgcatttagcgcacaattgctctctgcgggcaatggccattcatctccaactgggatgtttattcatcctctttagataccatctacagaggagacccagaggaagaagaggggctcacaggctggccaaaagcaggtgatcttcctctggggacctgatgctctcacaaagcctggggccttctgtcctgccctggggtggagacagaagactccttcccagacgagtgacctttagggtttgttatgaatagagattccttctggggaacgtgatggctgatgctgggaacccgggtccccagatttaacccctaggaatgtggagaggaatctccagacctccacccaggaggccagctctcccagccacccaggccagccagaagagggtggttctaagcagctcttccagttattggaccactgggaggtggactggaaccttccatgtccaggctgggaggcagctcctcagagtaaaaataactctaggcttcaaaatcctggggtctgcctcttcctccccagctatgtgacattcactggacaggtgcctcatgtggggggactttggttttcacatcaatctaatgggactaaatattataccaacctctcagcagggctgggactagggtgaagccagccaggtgctcaaggcataacatttagggaggtgcttgttctgaggcgccaaccctgcacttgctcaggccccggggtgagggcctcggtagatttgcaccctggtcaccttgctgcctcaacctggccccagccctgcctcccagggttgtcgtgggaaggaaatgagatattgtatacaaagcatgttagcacagcatgtagcatgcccttagtgctcacttgtggggaaaattctgttattgttctttttttttttttttttttttttttttttgagagagagtctcgctgtgtcacccaggctggagtgcagtagcacgatcttggctcactgcaacttctgccttccggattcaagtgattcccctgcctcagcctcctgagtagctggattgcaggtgtgcaccatcatgcctggctaattttttttttttttttgagacggagtctcgctctgtcgcccaggctggactgcagtggtgtgatctcggctcactgcaaactccgcctcccgggttcacgccattctcctgcctcagcctcctgagtagctgggactacaggtgcccaccaccacgcctggctaatttttttgtatttttagtagagacagggtttcaccgtgttagccaggatggtctcgatctcctgaccccgtgatccgcccgcctcggcctcctaaagtgctgggattacaggcgtgagccaccgcacctggccaatttttgtatttttagtagagacggggtttcgccatgttggccaggctgatctagaactcctaatttcaagtaatccacctgcctaggcctcccaaagtgctgggctaggattacaggcgtgaaccaccgcacccagcctgttcctattatttttattgactgcctttctgaggttggctgggcctgtttcccagcagtggccctgccttggacctcttgccatggccttcgtctctccctccacttgtacatattataccctttttattatttatccccttgtagcatggtttgattcccattatttactggttccttgtcccatgtctcctcctctgtgtcgacagcctggaaacaatgattgctaatatttaccaagtgctcaccatgtgccaagccctgggctaagcatttacatgctggatttcatctcatctttacaatgatcctatgaggtagggactatgattatacccatttttcaaatgaggaaatggaggcacttaaaaattgagtaacttgcccaaggatgcattgttagaaaaggatggagctgagggtagaatcaagatggcttaatccctaaaacccaagggatggaacccagaacactgcctcttccactcttcaccagcttctgccctgcagggtacacgcagatggctccaagcaggggccccattgctcactgggggaaactggcctccctgagctaagtcaggtcctgggcagagggacagatgctctctgtgcatctctaggccacagcagggcgtttccaagtccttcccagaccagacggcggcttctgctgtaggctatagtaataacaacagcgttgagcactcacactgtaccagagcaggggtggcgccgcgctgcacacctgccgcccagggtctccacagtcctcacgctgcccttgcattgattattgtctttatgtgaccagtgtggtagctcaggtgtcaagacctcaaggcacccagccagggtcgcatctcacgtctatggcagatccaagatctgaacttggacttgtctgaatcctggataagctggggggtgaagctggctgctgaggatcctgtgtgcccctcagccctgttcccaccacctctgtgcctcctccctgctggcagccactgtggccacaatggggttaaccccagaggaaggcattgaaggcgctggggctggggtgggaaggaaggcatatttcggggctccaaggacttgaagcctagctgctccatgcccaggctctgggaccccccaatacatgcacacattgtttaaaatgaagtggaactccaggcaggcaagttttgatttaggggagacagctcctccatggtaatgatactgagccttgttatttgagcaaataggttttctcccagcctctcactcctttctttgtaattcatcttccatcctggccacatgcaggccctgcttggaactctctggggactcctaccccacaggatagtctaaaaccctgccccggtattcaaggctgtttgcagatgttcctcaaccccaccacctgttgctcccaaaattcacacaccccagacctgcacaccacagttgttgctattccacacacaggtcgctgggagcagcgcacggcccagccccgcctttctgcaagtggatccctctgcctggaaagtcctccctcccctcctctggatcctcctgggtcaggctgggtgctcctctgaactcccaggctgagggttgctgtgtaatttgatactacattgacattgcaggaagatcatgtatggctgagtagctaaaaatgcaggctttgaacttggatgtgggttcagcctcagctgtatctcccgccagctgtgggacattgggctggcgtctctgagcctcagtttgcttctctgaacatagaatgatacgccctactccattaaggtgctgagggtgaaggaaaccacgggctcagtgtgggcagcttggccagggctccaagcgcatcgggtgttcatgtagtccttctagtgccaggcggtcattagcaacttggtgccagtctctgagctggtctccaggacggagcagtggagggaccatgtagcccctgctcccacaaacacagacattggacagccaattagttaccccagttcgttaccatggagactataattagggattatagtcaccctgcccaagcgcacaggcctcacctcccatccttgccttagctttgaagctccctggagcaggatctaaactggatttgtctctgtaacctcagttcctcattattcatggtcggaatgctcagcaaacgtttaagtggaagagatttccataacaaacacttgggagttcagaggagcacgcggtccaacctgaacagagcaggaggatctcagaggagggaggccactaggtaggatgcggcggcactaagggtagcacttagtttgtgacaaggactgttccaagcacaccacttggatcatctattaaattctcacttatttatttatttattttaaaattgtgtttatttatttatttatttatttatttatttgtttgttttgagatggagtctcgctttccaggctggagtacagtggcacaatcttggttcactgcagcctcttcctcccaggttcaagcgattttcctgcctcagcctcccaagtagctgggattacaggcatgtgccaccacgcccggctaatttttgtattaagagatgaggtttcgccatgttcaccaggctgatctcgaactcctgacctcaagtgatctgcccgccttggcctcccaaagtgctaggattacaggcttgagccactgcgcccagccagtgatcacttatttagatcacttactaaaatcatttaattatgtcaacacctctgtgaagtatgtactgttatcaccattcccatttcatagatggggaaactgaggcacagaaaagctaagtaaactgctcagagttacagagcctgcgagggccacagccagaattcaaacccaggccatctgcctccacagtccactttctatgtccctctcccgagatgatgtccctttcccaggggtgtctggaaagggtctggcccctggtcccagctcaagcagctgtccagggaagcctgaagacctggcccatctccactgcccaccgggcttctctgcgctccacttcccaggtggactgtggaggcaaataaggccccagctgcagcctctgaagactcctgccaagctggcactttgaggcctgggggtgtcccaggggatcccagcccagcagctgggctgacctcagggccagtgtttccgtaaacacccggagagccagccccacgtggttgatctgtgggttgctggccaagaggggctgaggtttggctgacctcgtgcggtttctttcaacaaggctacttccaccccctccgcctggctgggcttccagtaatgaagtgttttctctggggctaggggagctgatggggctggtggcgtggggcactggggtcttcctgtcccacgtgccctccaccctgggcttctggaagctggtctagatgcccctagctgccgcctgggcagcccatatgcccacgccggtccctgatagtgaactggcccgtaaggggaccaggtctcgggatctgagcatggagcaggggctgcgcccaggagatagggtgtggctagactttcccctgctggtcctttccggggatctgaggggaaacttctcctggggacacacccgggtagctcagagatggaagaaaaggtctccattacagctgccacctcttccccacccaaagagagtgtccgcagggggccgtggggcaggagtgagtactgaaggaatactaaccacgatcactgctaccatctcctgaatgtcactgccccagccctttaattctcacaacaaaccttggaaactgaggcttagagagaggaagtggctggcccaaggtcacatagtgagtaaatgagcagagcttctccccctttcccttgaatcacctctatcttcctgtccagatgccaggcagcaggaactagcaggtgcttttgggtcatcttttaagaggcaatatagcacaatgagtgagagcagggactcaagggccagccacctgggttcaaatcccagctctgcttcctactggctatgtgaccttgggcaagtcactcaacttcttggttcctcagtctccccacctgtataatgaggataataatgatgcctcctttagggggtttctgtgaggattgcatatacacgtgacacataataagccctgtgccatgctagttatcccagcctctcactcttcccattgaaaaggtgaagacacagacccagagatggaggcaaattctgcaggggtcatgcccggggcagagcatggttcagctatgtctcctatggtgctgccaaggagccaccatgggcttgagctgagaggagccacctggcaccggacacgtgacctcctcgagggaagggaggctctgcagagagcaggggatggtggaggagcctggctttatcttccatccttcaggagcggggaagggcagtgtcagagccaggagaggagagaagcgaatgaacgtgctgtgtgagctccagtcagtccctactgactctgggcctgtcactcctgctgagggactcgggtgtttggacttttagacttggaggggctcctcggtggggccttgggggctgctctgggtgagggctctcaccatttgcttcatcccaaaccactgtccttgggcctgttttaaatattagagtgtagcatggggttttgctgctctaacaaagggtcagccatcttgagaaggaggctctgtgatgagcagggaatggggctcccctgcccccccgagaccctggggcccaagctgatgactggccagtgactcactcccttctcagcatgtcctgtcatcccatgactgggagcccctcgggggtggctcctaaccaaggtccccctgaccaaggcctccccccaccctccccctaacacacatagagactgggaacaattaactccctcctaaggccagaccagatgttcacgtgggcattggttttgttgaccacatgtgactcaggagctccctcagagctggaagagtcccaagaggctaaaagggcaacctgtcacgtcacagctgggaaactgagtcccagagaagccaggtgagttgcctaacatccctcaggggtagaagggaggaaggaacctggagttcccatgcctgacccagaggctttctacctctccaaatagttctcggatgtgcccaaggcctcagtccccattcctacctccagttgcaaatgtcctccccaactacacagagcctctcagcttcatcccaccccacctccaactggctctcatggtttcatccaggctcagctacttgcagctccccaaatagctcctgctgtcaggccacctccaggcctttgtactctcctgctgctctgttttattttcctcttcacctggacaactcctaatcttgctccaagactcatctcaggtgtcaccttctccaggaagcctttcaaaaccacctcctccacctcccaggctgggttaggtcctccatctcttcaccctcagtacctagtatctcccacttactgtgctggaatcatctctttgcttgtctctatattgccctctagtctgtgagctcattgtggacagagaccttagtttttattcttaatagtagggaatgacctattacattcggtgtttgctgaatgaatgcataagtggatggatggatgaatgaatgaatggttggatggaagaatagatacatggatggatggattgatggatggatggaatgagtgaccaaatggtagatgaatggacaaatggaccgacaaacatggaaggatggatggatggacagatggattgatggacaggtggattgatggacaggtgggtcgatgggcaggtggatgaataaatcaggcagataatggcatctgtagggactcagacagtgagggctaagtccctggagcctggatatcctgactgatgaaggtgctcttggatgggaagggaataacctaacctgttgtcttcctactccaagagatatttggtccagaacaaagccacccctgccctggtgcctgctcccttctgaccaacaggttccaactcagtggggtctcctgaactctggtaactcatctgacaccagagcctataggaatcaccctgtctctgacattcagggattctgcattcctgaggccctccctccctgcctctcttcaggtcagagctgccgccccataaatgctttcaagcatagaaacatacacccctagagccaggaagttgtaaaaatgatgggattcacccctctaccatttttgcagatgaagaaactgaggctgagcaaggccaagaaacttgcttaaggacacacagcaatagagctgggataagagcttgggtctttcaattcgtttattcgttcatacagcaagtatgtatctagcgcctaaagtgccaggctcagtgcctattcccgggcatgctaggcctgtgcataagctttcatgttaatttaaaagctatttccatcctccatatgacctcctccagctccccagcaggctggtctatgcctcactagctgcatgcctggcatgatccctatgacaacaccctctcccagcaaatgaggaccacttcattgtcaggaagcctggctgggactggtgtgtgctgccgtgtgcagaggaggcagtcacatgtgtgtgctgtgagctgcacattccatcctagccttagtgaggaccgtattagtccctgcacgctcatccttgccagctcagactggagccaagcattaaactgttcaagccccacagctgccccaggcgagccattgcatggcacctgggagctcagggccaggagcagacctctgaattcctgcccaaaccagggaatatgtggtgagaggaggtcatagggaggtgcctgggggctggacatttgcaagccagctgagcaggcagtactcagcactttcctcttcacccctcccaccatggcaaaggcaggggcagcgtgggctagccagccttggagagatggagcctcaagtctaggggcagcagcccagcctcgggcgagccagggctatttgctgggccttctatgaggcttccatgaagtatgtaacctcgccgaagacatggaactactcagagtcattaagagccaaagaaaggctcagctgcgtttaacagaaaagcttctgggaacaaatcaatgaattggagaacaaaggaagactgcagaagacgaacagaaccagaagccatgtctaggatgaaatcaacatgaggtagagaatcctgatgacattgatcaggatgaaagaagtatgaggcaagggagtaaaatcaaatgccgagtaaaaagggggaacaacgttgaccaaggaatttgaagttaatttaagagctgttatgaacaatacaaaaaagaaaattataggcccatttcacttatgaatatatagatagaaaaacactaaacaaaatatttgctgactgaattcagcagagttaaaataatgacaccacatcaccatcaggaagcgtttatcccggaaaaacattccagaaaatccaccagtgtaattcactacatcattagatccaaaggaaaatctatgatgtcaattgatgtggaaaaattttttgataagttccttttgtatttatgatgcttacaaatttgaaaattctgggaaaatggagaaattaatagaaaggtataaaatgtcaaaagatgggcccaagaagaaatagagaatttcagtaggtcaatcagtattacagaaactgtaatggtgtcaaagccctcccactcccctaaaaatcagcctagatgttctcatgggtaagtactgctgaacctttttttttttttttttttttttgagacaaggtctcattctgtcgcccaggctagggtgtagtggcccaatcctggctcactgcaacctctgcttcccaaggctcaggtatcctcctgcctcagcccctcacgtagctggaactacaggcatgcaccaccacacccagctaatttttgtatttttagtagagatggggttttgctatgttgcccaggctggtcttaaactcctggactcaaacgatccacctatctaggcctcccaaagtgctgggattacaggtgtgagccaccgcgcccagcctgcagaaactttttagaaacaattaattcgtatcatatgcaagttgcttaaaaagaaaacaaaagaaaaaaaaaccaacctatcttattttaaaagtgttgtcttgattataaaagccagataagacaataccacaaaggaaagtataggtccatttcacttatgaatatggataggaaaacactaaacaaaatctttcctgactgagtctagcagagttaaaataatgatactacatcaccatcaggaagggtttatcccagaaaagtatccacatctgaaaatccaccagtgtaactcactacatcattcaatcaaaaggaaaaatccaacgatgtcagctgatgcagaaaaaggttttgataaggtctttatgtatttatgatttttaaaaattcttagcaaactaggagcatgagagaagttccttaatttagtagggatttttaataccaaaaacctacagaaaatattgctagtggagaaaagttttatataatacatgccttttaaggtgaggaacaaggcaagaatgctagttattactgctactgtttaatacatagagctggagagctgggctgagctacaaggaaagaaaataagaggtgtaattattggaagggaagagataaaactgtcattgtttgtagatggtgtgatcatctaccttgaaaaaccaaccaaataaactgacaaaatattagaacaaataagagagttcagcaaggttgccagatacacagtcagcaacaaaaatcaatgacgcttttacatcagcaataactaaccagaaaaacacaacataattttgacttaaatagaaaggttttaaaataatatatacatataaatatattatatataaaatgcatatacatatatatatacacacatgcacacattttaaaagcacagctggctatggtggctcacgcctgtaatcccagcactttgggaggccgaggtgggaggactgcttaagctcaggagttcaagaccagcctgggcaacatattgccaaaattttttaaaaaaacatttagccgggcatggtggcacacacctgtagtcccagctactaagggggctaaggtgggagaactgcttgattccaggaggtggaggctgcagtgagccgtaattgcgccactgcactcgagcctaggcaacagagcgagattctgtctcaaaataaataaataaataaaggtatatatatacataagtataaaaatagcgtatatatataaaacattatatctctctctacacaccacacacacacacacacacacacacacacacacattattatgtttctaatcacatgaatgaaatctacatgtagggtgcatttggcagctctgggtgtcatcagggatctgagttcctttatttctccttcgccctcttctgcacacgaagtccatcctcagggtaccctcatggtccaagatggctgcagaactccaccatcacgtccgtattactgactggaagcaggaggcagcaatcagtggtggtggagtcaccaaagggaagcccttccttttaaggagcctttccagaatcggcacacaacactcctgcttgtatctccgtgctggaacctatcccgtggccccgcctcctgcaaagctgagtgcgtcgccaccccaaacaaaaaaatcagtgtttggtgactgagggaggagggaagaaggatattggaatgggcattgatcaggctctgtcacagatctcagtctccaaaacacgaaactggggcactgaggtccagagaagtgagggaatttacacacagccacaaagcaaattagcagcggagttgggattttcacctgactgttgaccttcccatggtacaggtgtcccctcacaccctggtacatccagccactacagcactgcccctcctcacttccagccctgctggggtcaggatctgttttgtatttctctgtccccactacctaatgtcacacctgtgagctccacctccccagcgtcggcttgggacttggcatggggtagaggccgtaagcgggaaagcgggcacacacctcgggagctgacaaactgcaaagggctttcaaccgcagatatttacttgtggcttccatatgctgtaccttgatggtgatgtttcgtaagtttcacttttcagatgcattttttttttttttttttttttgagatggagtctcactctgtggcccaggctggagtacagtggcgcgatctgggctcaccgcatcctccgcctcccggtttcaagcaattctcctgcctcagcctcctgagtagctgagattacagatacgggccaccacgcccagctaatttttgtatttttagtagagacaaggttttgccatgttgtccaggctggtcacgaactcctgacctcaagtgatctgcctgcctcggcctcccaaagtgctgggatgacaggcgtgagccaccgcgcacggccagatgcatttcttagacgctaaaaatgttcagcctggcccaggcctggaagaacatgcaggccgcttttatttttatttttttttaacagatggagaaactgagacccagagaagcaaaagtgtgtgtcccagatgccaaggtacctgcggcaaagaatattacctagatgtccctcactctggttctccttcattgatacacatggaatgatggtatttccccgccttccttgcagttaagttggggccatgtggctagctctgactaataagatgtgagtagaagtgatgatgtggcttctccatccctcttttttcctgccaaggtgaccttggaggccaccggtctagaacagggattcacaaactgtaatgtgcatgcaaatcacctgggggtcttactaaaatgcagatcctgatagtggggtctgggagtctgcatttccaacatgcaaccagctgatgctgatgccatcggtccttggaccacacacttgagtagggaggagctacaggatgtgcctggcccactttggaccattcacgagcaagaaattagcttcactgggttaagccactgagatgtgggcattagtttgtgatctcagcacagtcttacggaaattgtcatttagccatcaaccaacattgactgagttcctaccatgaactcctgtgtgacctgggtgcctcattctgaatgaggtgctcactcttggggttgtgcaagtgcaaggtcagcagctgagaatgagagcctccctaaatgttatacccgacatgcctctgtcacctcaccctggtcccagccctgtaagtcggtagcgggagccgggatttgaagctcggacctgttgacttctgagcttgtgcttcctcctgggaaagcaaaggacagccacactcaccctgggcccttgtgtgggggctgcggctgcagccaaaagactcatgggttccctggatgcttatatccctctggtgccaaaattggacagtttgaagggagggctgaaccgcagcaaaccaatcagcaaagtggcagctcccaccgctcctgccacacccactcatgctgaactgtgtgtgcaagctccatccctcacacttcatcaccaaacacccttgatgatgacgcctgcttcctgatctggccaggccccagggcccctactgcccacactttcccatcctcagttatcagacagaaaaagttccaagaaaaatccatgctctgactcagagggccctaggtgggcatagcactctgcctcgttcttgccacctccctgccccgtatggccctgtcttcttcaccatacgtggcacccatggcccacctcacctcctcattgtcaaggtctccttgctctgctatggacatggctgggaccagcgtgtctccctccaactctcttcctcacacctcctcatttctcccgtcttccttcttgcctcagagatagaagtggcttaaaactgttcctttcaggaacaactaatcagtggccacagaggtcagaatagcgggtacctggaggacagagggtagagtcttggaaggggcataaggaaacttctggaagtgtagcttgacctgggtgattatcacatgggtatatacagtcatgtatatacatatgtcaagagtcaaaattagccaaacatgctgcctcatgccaccagctactcagaaggttgaagagggaggatcccttgaacccaggaggctgaggctgcagtgagccatgttcatgccattgcactctagcctgggagacagagtgagactctgtctcaaaaaaaagaaagaaagaaaggaaagaaagaaagaaagaaagaaagaaagaaagaaagaaagaaagaaagaaagaaagaaagaaagaaagagttgtcaagctctacacttcatattagtgcactttaagcacttttctgtatatacattacctctcaacttaaaaaacattatcacagagagctctatggacagtagcagaaataaacagcatcaaaaactgaaacttgggtgttggagtcatatgaacccgcactgaaaacctggctctgttttctagctgtgtagctttaggcaagttacttaacctttctgaacctcacttttttcaattgagatgtggatcatgaggattagaaatgctgctttttataaacagtgcttagcacaagggctggatcttgctgggtgctatacacaattgcttttatttttattaatatcagtggcctagggaggacaggaaagtcggagtgacctttcctggatgcaggcaataacgggtggggggcctacagaatttaaagataaaataaaactgatgagaagtcagtctgcttttatgatcactgtgcaatggcagatctaaataatttcagtggtaaaatactttgtcctgaaaataccctttattgatctaagttctaacaattggtgcagtaactgttggggtttaataatgtatatgtaaagcttcaaatcagcacatttttattcttatcctttaataaacatattctacatggaagtcaacttgacttggagaactttaagaatcctatagttgcccccagagcatgtggtctcaggaacacacatcagttgagagtaagctcctcacaactctggaatcttccaagcttgctttgaatgcattcctgtctccaccgtccagcattcatatttctgcatttatttttattattattttgtgtgtgtgacagagtctctctctgtcgcccaggctggagtgcagcggcaagatgtcggttcactgccacctccacctcccgggttcaagcaattctcctgcctcagcctcctgagtacttgggactataggtgtgcacccaccacgtccggctaatttttgtatttttttttttagtagggacgggtttcaccatgttggccaggctggccttgaactcctgatctcaggtggttctcccactttggcctcccaaattacagacgtgagccaccggcccagctgtatttctgtgtttaaacagtagagtgaaatcaactatgaacgcagaatgatgggaaagatgacgataagggtatttcaattttgtcattttacgaaactacttggagttttgatttgtatttacagtttttaaaagagtaaaacagtgtgaactgtgaatggtaatgattttgtttggtaagtgcaaattttaattcatacatgaaaaatatttgttttgtttcatgattattactgaaaataattttgtactatgaaggaagaggggtgttaaaaatgatccactgtggatgtaaattattctaggcatgcttctgactaaaacattagcatttccacaagaatcccaaaaaataaaacaaaatttaaaagatcccttctgtttcttttcctccaagtttccagacccccatctccaccctggccacctcttcctgccataaataatcaaatcccacactttcatcttcaccttccgtttccattgcctcttccgatgggacagcacccgtggggaatctcctccatgctcacaatccccgtcttgccactatatcaagtcacacttcttcctcaccaatcgcccattctggaacctctgctatccagctagatcactttgaggtttggacaactactggtggaggtaatgggggccccagacagcccttgacatcacctcttttatctttgccaaattctacaaacaaagcccatgtctttctgtcccccgcccccatggctggcacatagtagatgtccccaaatcttggtgatgtgaacttgtgtgtctcacccttcacagacatcaccatttcccgttgcacagaaggctccactcataccaggcgctttggctcccagaataagcaggctatcatgctatgtccgacatctaggcgttggtacgtactgttcccttggcctggaacattctgccctctctcaccctctcttttcttggctttctgaaatggcacctccatcagaaagtgtccctcactcttggtctgagcaagggaccttgcctggtattcctgaacttccacctgttttccctctgttttctccctctctgggccttgtcctcaggtcagtgttgtgcctccagctcctgcagaggcgaactcagaggcggccgaatgaaaccaaatggatttggcttgaccccatcatctagcggtgcccagcaagcgctggcacatagtaggtccagcctgcccggactcgcccaccacgggcccccttccagagccgggaggcaggccaagggaggccccttattgccaagagcaaacaggccgcccagggaagttttgctctgggtcacacccacctctgggtggctgccaatctgcctgccagaaaccgcaggctgggccgcggctacccagagtcagggccacggagcttaggagaccttgggtcagctctgcaaaggggttgtttactgaatgcttctggtatctgcagccccgctggggttcggacagggggtctggaatagggcttcacaactacagcagggctaggaccctcttgggctggaaggagctggagaggcctctgcaagctgtcacaggctcttggtgctggcactggctcaggctttcacacacacacacgcgcacacacacacacacacacacacggacaggcacccccttggtggccttcacagtttcaccttcaggtaaatgggctcatcctttgagccatgaggatgggaagcgaagcaaggaatgaaaaagctagtgtgtttgtgtgtgtgtgtgtgtgtgtgtgtgtgtgtgagcgcgcgcgcgcgcgcgcgtgtgtactcgtgcgtgtgcctgtgtgtgcctgggagtgacctcacagctgccggaacataaagactcacaggtccgcctcccaggctcaaagctggctctgcaggggacatgagaggcacaccgaagacccacctcctggccttctccctcctctgcctcctctcaaaggtaaggaggcccgggccctggaatgcactgctgactatttgggtgtggagggggtggggatgtaaaatcgcagccaaggacccccttggcagaattcctccagggccccacattgggcacagtctggcccccatgcctaagcagggcttctctccctggaactcagagctgcctccggccagccctgctgtgtgacctcagatatgtgtcttgccttctctgggcctcagcatcttcccaggtgaagggtatacagtttgtgaggcctctgtgaagaccattcatgatcattcatcaaacttaccaggcaaattgaagaggactttaatgtatcctcattatgaatgggggcactcaagacatgacatgcttggcctaactctgagccagcatttggatggatgcctagctgattggaaggttcattctgcaagggcatcaatgctgttggactcttaggcagtgagtgacccgcccgccctagctagaggggaacaggagacacctctgtggagtaatggccttatccctgaatgctgcatgggacattcaccaaagagcctgtgggacatctaccttgtctaacatgcacaacaatcccataaggaattttcagttaagtgaggctcagaaagggtaagcaacttgcaaccccagttttcagtcaagtgaggctcagaaagggtaagcaacttgcccaaagccacacagcaaagaaaggtcagagcaatagaggagagccatggtggagcccagaatgacatggatgtagggggagaagcactccagtctgtgcctccccaagcccaaactggaccaaggccacagctgctaagccttgtcatcccctcggcaaatgctgagttcccagagccatggaatcggccccaccacaagccacgatctcactgtattttcacgctcctttgaggagcacgggcaggagcttctctccctcaggctccaagtcttcgtgcctgggaagcctgagaaccacgctggcatcctgtcctgctgtttgttcttccaaaggggatgggtagggcatgatgccagtgtgggtggcttgggtagttggaataggggacttggggctctaggagggagaaggggcccaggattatacgagaacaaagtaaagctgtcctagacttgccattagggtgagacttacgggaccattcttccctggtcccaggaagcagggactgcacagaaacacagggacttagtcaccacaacatggaaagccacagcaaccctcagagggagaactgtaagtcttccaggctggccgttggctccggggctcctggctgtggaccggggcaggaggcagacacctggacacaagcaaaatcacattgatcaaggactggccagaacctcatttaatctccatcatcactcagaaacaggttgtctctactccagtttacagaggagaaaactgagcttcacctccaccttccaaagccgtttgtccacatgttcagtcacgtagcaagtcactggcagaacttgaatctcaactcttgcccaaaaaactccatgcccagtactcctgccccagatatcatgagccttgccccccaccaccagatatcacagcaaggccctggggaaactgaggcacaatgggacaacttgagtttgggccttggatgtcaacttgaacttggatgtcaatcctgattctgtctcttactggctgtgttactacacggtttgagctccagttttctcatctttaaaatgggcataatgatggcacctcacattggaggggtaaatgagacaacagcacttggcacatgacatacatatggtatcacatgagataattgtacactagaatagttgatatcattaatagcctctcctgggtatcggggcctacagagtcctgccccctgacaagcatggccagtagaggggtccacagtgggagccaaggtgcacagctgctggtctatttcctggcactcctgttttcaggtgggagggacctgagagtcatttctgacagtcctccctccattgcccacaagccaagggagctgaacctctgacttagaagggaacccaaaagcctagaccgtttctatgtgaatcacctgtggatttatgaaaatgcagattcgggctgggcgtggtggctcatgcctgtaatcccagcactttgggaggccgaggtgggtggatcatgaggtcaggagtttgagaccagcctggccagcatggtgaaaccccgtctctactaaaaatacaaaaaattagctgggcatggtggcatgcacctgtaatcctagctacttgggaggctgaggcctcccaagaattgcttgaacctgggaggcgaaggttgcagtgagtcgagatcgtgccactgcactccagcctaggtgacagagcaagactccatctcaaaaaagaaaaaaaaaaaaaagaaagaaaaagaaaagaaaatgcagattcggatttattatataaaaattcagcttcggatttatagaggggctccagatgctgcctctctgacaagctcctagatgacgctgctgctgctagttcagaccacaccttgaggggcgaggctaggccatcgtctctagaatctgaacagcctgcagcgatgggatccactcccttgtgaggcagccagacacctagctccgtgtgtccatctgctactcagtgctgtctcagtgggggctgtgatcgcctcctactttgtggcccccaccagaggctggtcagccagtttgcaatggctcctagtggccggcgtgggagttgccgggaactgaaagcaggtttgcaggattgtgggtagtgggggcactgggcggggcagagggtgaggcagagcaaaggggtcattgcctgctttggggctgcacaggagatatgaggtcattaattccatcattataaactgcaagcctccattcctctagatgaaaccctcatcccctaaggatcctactaaactcaaacttggccccccaaagatggggccactggaagcatcttgaattatacttccttcttggtccccaccttcaaatgggcagacagggagctcacggcacctgctgtatgctttggttgtttctctgatgtgggtggcgagggtcaggcaggccacatgggctgataccctgatcctgtctctggggagtgggtccctggcttacggacacagtctacccccatcccgtgtccctgagtcctcacttgggaagcaggaccggggacgctcccagccctgaatcgaacacactgacgtgtgctaagttcctgtccctctctggagctcagtttccccatccgtacctggcagggggaggaggttagactggggcagaggtgctgaaaacctagctgagcttcagaagccactggacagcttattaaaaataaagattccaggtccctgactctgggacttctgattttgtaagccccagagtgggttgggggtctgtattttcccaagtctcctggctgatgtgatgtacctccagagctgggacacatgctgaatggatcgaaaggccaaaaacatccatgatatggttcaatttattcagtcctaagataagtatccgtatgctggaaaatgtaccagaccctaccattttcatccttgacttgttgcttttgcctttctgtaagctcccagagggctggggctgagccctctgccaccattaacaacaaggatcatcaaagctaagtgcagtgagcgcctactgcatgccaggccctgtgctgagggtttgctgtgcagcatttcatgtactcctcagagcaatcctctgagttagatactttgaggaaactgaggctcagaatgcttaagtaacttcctcaaggtcactcagctaataaggggcagaattagaactggaagtctagccaggtgcagtggctcatgcctataatcccagcactttgggaggccgaggcgggcggattgcctgagctcaggatttcaagaccagcctgggtaacatggtgaaaccccatctctattaaaaatacaaaaattgccaggcatggtggtgggcgcctgtagtcccagctactcgggaggctgaggcacgagagtcgcttgaacccaggaggtggaggttgaagtgaggctgggatcgcgccactgcactccagcctgggcaacagagccagactctgactccaaaaataaaaataaaaaataaagaactggaactctagtccagagtccttgcccataactacatgccatactgcctcttagggcatgttgtgggactactggcctttgaggccaggtctgcatggctctgaggctaaggtgtggacaccacactacccagcctggcagagaagtggctggttgtgagggtctcactgcccacctcgaaagcccgtggctgagtgaggtctctgtctcttcaggtgcgtacccagctgtgcccgacaccatgtacctgcccctggccacctccccgatgcccgctgggagtacccctggtgctggatggctgtggctgctgccgggtatgtgcacggcggctgggggagccctgcgaccaactccacgtctgcgacgccagccagggcctggtctgccagcccggggcaggacccggtggccggggggccctgtgcctctgtaagcaggtttgcaggactgagtgggggcgggtgtgagcgggaggtcaaggccgtggtgtcctggatcaaagtgcagccctcctctctctacctccttgggtgctcacttcaggtatcccatccattccagctgaacttggtgtcccaaagcccactccccactccctcctctcccttcttggcctctgcttaaaccatctcactaccccaataacctttccccatccctacctgtccaaatcattgccaactttcaaagccaagttcaaacagcttctcccctgagaagcccccccagattcttcaaaccagatgccaccactcccttctcaggatccttacaacactttggggaaaataaaagtgcaaccttttagggcataatatgtgtccagaactgtgctaagcacttactacacaagtcacatcatcctcacaataaccctatgatgggaagtactttcagacctattttatgaatgaggaaacaggttcaccagcattaagggacatgcttcatgtcacacggcacgggaccagatccaacgggctctaaggaacagtttattctgtcttctcccatagtgggggccctcggagcactgctgggatcctgggtttgccatgtattcagcagtcacccgagcatgtgacattcctcaccactcttctaggccttggtattctctgatgcttcggggcagggctttgcaagctggctccagtgactgggtgccagagaattagttgttgtgggagggctgtcctgtgcatggtaagacttctagcagcatccccgaactccacccactgtatgccagcagcactccccatcccccaagtcatgacagtctgtcttcagacagtgccaaatttccccagggggcaaaatctccagttgggaaccatcactttagagaaatgcaaagaggcaagagattgttcttcttttttcttttttaataataagccttgtagaacaatttgcctctttcatctatgtgcatgtcacacttttataaaaataagaacgaaagagagagagagagaagctcatgaatcattgataatgaattcatctgtaggaaaagccttgttaaaaaacaacaggccaggcacagtgactcatgcctataatcctatcagtttgggagactgaggcgggacgaccacttgagcccaggagttctagtccagccttggcaacatagtaagatcctctctctatcaaaaaaaaaaaaaaaaaattagccgggtgtggtggcacatgcctgtggtcccagctacttgagaggctgaggtgagaggctcgcttgagcctgggtgtttgaggctgcagtgagccatggttgcgccactacattccagcccgggcaacagaccaaaccctatctccaaaaaaaaaaaaaaaaaaaaaaaaaagtaataactccatgtgaaatgctttatttacaagtactgtaaggataaggagggtgattcgttacactgactgagggatgattgcttatgaaaatgtatctgaagaacaattgagataagtaacacttcgcttacaaagctgttatttacatttgctgtgacacgtgtaaacagcacccacagagtttattttacacttgcacagcccttaccacgtgtaagacactgagggtttcacaaatataaactcatttaatctcacaaccacatgaggtaggtacccttctcttataaatggaaaaaaggggtacagagaggctaagcaacttgcccaaggtcacacagctcataagcggcagagctgagatttgaactcagggagctggctccacaagctccattgctcaactgcctgacatgcagcagttgattagtacataggctgtgattgttaataactgtattaagggatttttcttattccatcttaattcagacttcaaacacctgcaggccaaaggcgtacttgggtccctggtccttcctgcaacttcccaccttggtctgtcaacatgatgggtgctcaacagtgtttaatgatttaaactgaatttagaggccgggaactggtgaaccccaaagagtccagctaagacatcacaaaggctcagtctagggctttgcagggaacatactgccaaaaacctctcccatcacttactcgttgaacgctcttctctaagggccaactctgagctgtgagatgtgctgcagattcaccatcgtgataacagcgcatccaatgccgggatcctgatcttccgccccccagaacggcctccccagtctgttgagagcacctccatccttctcatggctcagactcaagacctgggagtcgttctagaggtctctctatctctctctcttttttttttttttttttttgagatggagtctcactctttcacccaggctggtgtgcagtggcaggatctcagctcactgtaaccccatctcttgcgttcaagcgattctcacgcctcagcctcccaagtagctgggattacagacacataccaccatgcctcgctaatttttgtattttagtatttcagtagagacggggtttcaccatgttggccaggctggtctggaactcctgacctcaagtgatccacccgcctcggcctccctaagtgctgggattataggtatgagccaccacagccggtctagacatctctcttttctcacctcccacataccacccaccagcaaattcatcgtgtatttccagcatccgacactcccatcccttctggtctgagccccgtcatcattggcctggattttgcagtagccccataatcatctccctccttctgtcgttgcccctggtctattcacaacacagcagtcagagagctcctgggaagtcataagccagatcacctccctcctctgccccaagccttctggtggcttcccatctcagaggaaaagccaaagtccccacagtggcctacaaggccccaacaggatcctgttcatgcttcctctctgacctcctctcctcctgctctctgctccagccacattggccccttgctgttccttaaataccccaggcacactcgtgcctcagggcctttgcactggctgttccctctaccagcattatttctcagcaaggccttccctgctggaggattagatgagctaggggacttacagcattttgccccaagcctggcacatagcagatgctacgtggaagcataaccctctcctgtttattgagcatctgctatgtgccaggcttggggcaaaatgctgtaagtcccctagctcatctaatcccccagcagccctgtgagccgggtaccaaggctcagagaggcaaaataacttgccccaggccccacaagtgggagccagagttggaacctaagtatgtgtggttttggttctgaaacccctgtgtgtgtacagacctactggaaggttttctcagaagatctgggagaacttgtttgctaatgagtcctttccccagacgtagctcagtggccacccaggtctcacacacacgctgtttcccgtctgcacttcctgagcagctcacacgcttcaccagcgctcttacttcattctgtcttggagatgatgccctcacacccgtccccctttcccaagcccatgagtccctcaaggcaggaactgtcctctttctgtctgggagcacagtggttggcacacaggcgggaaacagtaaatatctctggaatgataaggagtagggctattttatcagggtctctcatgtgccaaggcttatgccagctattcactgaaggggcattcctacagtactgtgtgtcgcacctaggctctgagcccaccggagggtgcagagacgcacactggccgccccagccctcaaggagttcatgtccagtggaggaagtggcaataacacccatatcttgagggcttcattgaaagagtgttccctgagcacctaggccatgcctagcactgtgtgctagagggtacggacatgtcatcccatggaacctgaagttacgattactgagctcatcattgctgtagttcaggccactcagagaagttaagtaacttactcaaagacacacagccagcaagttaagccctgacctgacagtgatgacagcacaagtggacaacgactttgttgcatgaaatctcagcgtgtatagaatacttaaactttattaatatatagtaactatactaatgataataacagagtagctaggacctatggaaggtctcttttatgttgtgatcattacgcctatcattccgagtagtctctaccaccctggaaaataagtaccattatatcccagcttgcaaatgtggaaactgaggcaagaagaagtgaaatcacttggcccaggttcacagctaagaaagggcagagtttggggggtcaatccaggcctgtcttcttgcaatccctgtgccgggatccagggtgccccagcaggctggtggagggctggggagaggtgcatatcctgggctggagccctgggcagggcccagctactgtgaggcagctgcctcaggcagcgggatctgggcagctctgcagagaaggctgtgccgctttgcgggtcaccgatgggggtgcggtttttcctccgcagtggcagaggacgacagcagctgtgaggtgaacggccgcctgtatcgggaaggggagaccttccagccccactgcagcatccgctgccgctgcgaggacggcggcttcacctgcgtgccgctgtgcagcgaggatgtgcggctgcccagctgggactgcccccaccccaggagggtcgaggtcctgggcaagtgctgccctgagtgggtgtgcggccaaggagggggactggggacccagccccttccagcccaaggtgagcgcagcggtggtccaggtcagggcaggactgcctgggggcgccaagggccacctagggggtggggtggggggcggcttcctgggtaccaggacccagggacacatcagaagctgggaggggcggaggctgaggagggagataagaaagaggagtggagggccgggcgctgtggttcacccttgtaatcccagtacgttgggaggccaagacgggcggatcacctgaggttaggaattcgaaaccagcctggctgacataggaaaaccccgtctctactaaaaattcaaaaattagcctagcatggtggcgggcatctgtagtcccagctacttgggaggctgaggcaggagaatcgcttgaacccgggaggcagaggttgcagtgagcccagatcacaccactgcactccagcctggccgacaagcacgaaacttcatctcaaaaagaggaaaaaagaaagaggagtggagggtcaccaggcctccctctttaaaaccaataaacaaaaagccactgcctttgagatgtgtaatttaaaaccataaataattaaaaataaaaactgggtgacagagccgggagaggaaaggtgggttagggtatgtgaaccaaattctcacatttcagagatataatagagctaagctcttagaatatataatattatcgtatttataatatattgatacatattaatatatttagtaatttattattatttgggcttactaaaaaaggaactcaaaactgaacgaggcaaagtggctgctctggaatgtgggccgggggtgggctagagatggagaaaagacagttacctcccaccgtcccactataaatcttcaattttagagatttttgttgttgctgtgttgctttttgaaaattatcacatgaatgtgactttctaaaaaaggcaactgaaaagaggaggattgatttcataaatgctgctgccacccacaagaggtagtcacgtgttatgggtcaggtgcacggcatctgcaacagccccgccatcccctttttgctgtgtgactctgagaaagttgcttaacttctctgtgtctcagtttctccagctgtaaaatggggacaataagagcatccacttcatagcgttgtgagaactacttgagtttgttcaagttaagcagctgtagcagtgcctggcacatggtactatatcagaggtagccgttattatccctgtgatggaatatgatatatccatttaaatacataggaaaacaccagtgagttcaccttatggataaaagcaggataagaaggtgtatttccaactcgatctcaactaagtgtgtccctatgcacgtatacaggtatatctacacatacacatgcatacacagcacacacatgtgggtagaaatcagggtttctcaacgtcagcactagtgacaattggggcaagtaattatttgttgggggggttttcctgtgcactgcagggtgcttagcagcattcctgacttctactcactagataccagtagcatccccccagttgtgatcaccaaaactgtctccagatattgccaaacctttcctgggaggcaaaattaccctagttgaggacttctagtgtaagactagaaggaaggacaccaaaatactcacagagggagacttggagcagagaaaaagctagaccatggtgaacctgccatcttgttcctggcacaagaatcctggaatctttagcatccttgccactgggccaaagcaccactccacacaggctgggcaccccctgcctgtaaaatgctgtttatccaaagagacgagaaaaccatggttcactgagggaccatcgtgaccaacacactctggttgccaaataactaatatttatggaaatcttacaagtaccaggtactgtgctaggcacttcatgcccattattttattcaatgccatccactgttaagaaatttacataacaagaaactgagatgcagagaggctgagccatttgaccaagattgccgtggccgctggcaggtgggttgattgagctgctgagccctggctgctcagtgctaactcttgttctttcccccctaggaccccagttttctggccttgtctcttccctgccccctggtgtcccctgcccagaatggagcacggcctggggaccctgctcgaccacctgtgggctgggcatggccacccgggtgtccaaccagaaccgcttctgccgactggagacccagcgccgcctgtgcctgtccaggccctgcccaccctccaggggtcgcagtccacaaaacagtgccttctagagccgggctgggaatggggacacggtgtccaccatccccagctggtggccctgtgcctgggccctgggctgatggaagatggtccgtgcccaggcccttggctgcaggcaacactttagcttgggtccaccatgcagaacaccaatattaacacgctgcctggtctgtctggatcccgaggtatggcagaggtgcaagacctagtcccctttcctctaactcactgcctaggaggctggccaaggtgtccagggtcctctagcccactccctgcctacacacacagcctatatcaaacatgcacacgggcgagctttctctccgacttcccctgggcaagagatgggacaagcagtcccttaatattgaggctgcagcaggtgctgggctggactggccatttttctgggggtaggatgaagagaaggcacacagagattctggatctcctgctgccttttctggagtttgtaaaattgttcctgaatacaagcctatgcgtgatcttgtgtgtcaggcctgtgttttctgagaaagccctcccattatccggggcagaattcaggggcagagttctctgtgaacctcacaaggtgaaatcacatggtcttaaagaaagccagaagacaggccttcaagtgatccaagaaacccaattcatattaataataattaacttttttatttatttatttttttgagatggagttttgctcttgttgcccaggctggagctggagtacaatagcacgatctcgactcactgcagcctcccgggttcaagtgattctcctgcctcaagactcctgagtagctgggattataggcgcatgccaccatgctcggctttttttttttttttaaatatatttttagtagagatggggtttagccatgatggtcaggctggtctcgaactcctgacctcaagtgatccgcccgccgcctcggcctcccaaagtgctgggattacaggcgtgagctactgcgcccagccaataattaacattgcttgagcgcctgctatgtgctaggcactagcactttatacagaccagtgcttcccagcgtttttgaccagagaagagcagggagaatgaaggctgcctcccagggactggggagcatagcctgaaatcaactaacccaagggtgaaattgttcgaagtctcatgttttattgtttacaaacaaaacaaaacaaaaaacaaaaacaaaaaaaaacacccaacaccaaatacatatattttacattttcctccatggtctacctgtgtttgtttaaaaagtaaaactgtatttccattaggatccaagcaggaaattagaaaacactcttggtatttaaacagggatttcttcttattaaactaattttattaaggtataatttacccatagttaaatatacagattttaagcatatggtttaacgagtcttcataaacgtacacgctcatgtaaccaactcctcaatcaaggtataaaacattttcatcatctcagggagttccctctggctctgttccagttatccccctgctccccaaggcaaccactgctctgatttctatcaccatagatgagctttcgtgttcttgaacttctcattaatacaaccatacagcaggtactctataatgaatgacgtctttcactcaacataataaaacaaaaggaatttaatgagaggacttagtcacccatctgagaggccaagtaggggaccgtgtgatgcaagaggagaaattcaacaccagaccagccctcggggcggaggggcagagggagggcagagcccagagctggcaccagcaggcagaggaagaggacctggcaaggctgtctgctgggagctgcagccgctaaggagacacagcctcgcagacctaacaaaaagtagatggaggtggggagacctgccctggcttctgcctgctgctatcccccagtttccagttatgcctcccatgagtcgaacctgctgggaaggtggaagagaggggagcctgggagatgcaggacaaggaagggcaggagggttctgagaatgagggcaattcccagacacagtgtttgtaaattacccaccccaggtacggttgctggtcacagaggcccctgctgcccagcccccaacacttatctcaggtatcaccccctccagaaaccttagtttgagaatcacatgctgagtttgagccatgtaaccttcacagagcccctgcatggcaaatataactaactccagctcagggataaggaaacacccgggaaagcgagctgtctaaaagctggtctgcagctggggtgggatgctagtccaacctgagtttatctgactcttgagaatggctgttggtctctcacagattgagaatttccatgggtctggttctgcaaggataaaccctaaacacatttccaggcaaaattctgataacatcccccaaaacagggagaacacggacaagaatgaggaatgtgcaccgagggactcccatacataaggctctctctgccacgcactctgtccacaccactgcacgtcatccttgggacattcctaaaggaaagtgccactaatactccctgtttagagatgagtaaactgagacccagagtgattaacaagttaccctggagtcgtggagctgggactcaggcccatgacctcacagctgagccgccactgtgcagtggtagagtgagtgggctcagccaacctgcccaggtgtgcatcctggctctgctatttcctagtgctgtcatcttaggcaaagtacttaacctccttgtgcctcagtttccccttctttaaaatggggataatggcaatactcaacacagaggattgttgaaagtgttacgtgatttacaaaaaaacttagggccgggcgcggtggctcacacctgtaatcccagcactttgggaggccaagacgggcagatcacttgaggtcaggagttcgagaccagcctggccaacacatcaaaaccccgtctctactaaaaatacaaaaattaactgggtgtgatagcacacacctgtaatcccagctactcaggaggctgaggcacgagaattgcttgaaccggggagacagaggttgtagtgagccgagatcgcaccactgcactccagcctggtggacagagcaagactctgtctcattaaataaataaataaataaataaataaatattggaggccgaaagattgagggtcatgatcaactcagtataccactggaagctatatgagtaagcagcagactatttctcataaatgcagaatgttggcaaactgacaaactgtttctgccatccagaaggaatgctgagggcagtcacgctccaagcatagtgtttcttgtgattaggcctaattgaaacctgttagtaacaatatgaatctgtgatcaatcaaccagctaaccagtcattacctcctcctccctgctcattctacccaataaataggaagggctgtggaagctcagggactgcctttgctcactagaagcagggagttctcttcttcttcccctggccctttcctttacaacagtttcttttgtcttaagttttcatttctacattcgtcccctcgttcagtcctgtaatgaagtctcaggcagtaacagtagtaactgctgtaatgacggcctcaagtagtaacagtaataactgtcatagtgacagtctcaagtagtaattgtggtagtctgcaacaaaataaaataaaataaaataaattttagcaaccgttatcctaactcttggcgctttagttttttgatctgtaaaatgggaataaatagtagtgcccaccccacaggatggctgtataaagtgagtacccggctgtgtgcagtggcgagcacgcctgtaatcccagcactttgggaggccgaggcgggcggatcacctgaagtcgggagttcgagaccagcctggccaacaaggtgaaaccccatctctactaaaaatacaaaaattagccaggcgtggtggcacgcacctgtaatcccagctacttggaaggctgaggcatgagaatcacttgaacccaggaggtggaggttgcagtgagccaagatcatgccactgcactccagtctgggcaacagagcaagactctgccaaaaaaaaaaaaaatagtgagtatccactccgcaggggtattgtgagtattaggaaggtaattcctccatgttcttcaactgaagctattattatcatcctgcctgcaattcttggcaagtgttgtgaaggcaaagactgggaatcctcttgtttgtggagaagaggaaacgtgtcgggggcaaagtcacaggggcaaaccaggtttaccctctctgaagctctcacggccacaggtgcccaggcctggccattcctccatgggaagcttctgcactcacttcctcagtgctggcctgggtctgcggggcaagctgagtgtcccggggcagaatgctttctggagaggactccgctaccagctgtggctgaaggacctggcacagggcctgttcctggggcccttggcacaccatcctcctccagccgagagccgtaaggaagaagtttccctagtgaagggcatcaacaggccccaggaggtcctcctgcctgccaggacacccgtggtcctccccatcctaactagttacaattaaaatgaatctagcaaacacagacagccaggccctcccacgccctgctctgggatccaggaacaacgacggcgcccaggggagcccacacacttaaggggagcagcttacagtctcactgtttattgagcagctactgtgttcttgatgcttttgtaaaccagaaagtgtctgagacaggtctcaatcagtttagacatttatttttccaaggttaaggacacgcccagtagagaggtctgtgcctttctctaaagatgactttgagggcttcagtatttaaaggggaaagcaggctggaggggaaagaaggagggtctggaaatccacatattgcaagagaaaaagagcaggtagggaaattatgtattcgattatgtattcgtctcacgctctgtaactttacataagataaggtgaacacagagtggctactcgtggagatacctggccttttatctgtggctctctgcttacgaacaaaggaaaggcagcttgttgcatgactcaactttcagcttagttttttccttttggcagagtgaattggggttttcattttcctttcacactttctataccttctcttattgaaaatgaggtggttgctgtgatctgcattttacagatgagaagctgaggcttgaagaatagaatcaccactcacaatccaggatgggaagtcagaaccagctgaaccagcggctagcccagcctctctccctctctctctgttcctctctctttcttctatctctctatgtttctctctctcaccgtttctctcttctgtctctctctctctcatcctctctcctcctctctttccattttgtttctcttttccttggctttttcttctttcttgaatttttaatgaagtataaaaagtatacaaggccaggcacggtggctcatgcctgtaatcccagtactttgggaggctgaggcgggtggatcgcgtgagctcaggagttcgagaccagcctgggtaacgtagtgaaaccccctctacaaaaaatacaaaaatcagccgggcatggtggcacatgcccgtagtccaagctacactggaggctgaggtgggaggatggcttgagcccaggaggcggaggttgcagtgagccgagattgcatcactgcttctagcctgggtgacaagagtgagaccctgtctcagaaaaaacaaaacaaacaaacaaacaaaaagtatacaaataaaagtgttcagttagtccagttttcacaaatgagcacacccatgcaatcagtacctgggtcaacagcaggaccatgcattgcctgcacctccaaaatccaccttggtctccctctcttcactacccacaagataatcactatcctgacttctaacagatagatccattgtacctgaccagaggcagcagccatcacctggagacttgttagaaatgccccatcccagacctacagaagctctgggagtagggcccagaaatctattttaacaaacctcccatctcgttaaaatcagacacagctccagctcgggggaggacagcagtgatgtgctgctgcctccttgtggcatttccatgcatgaacagccgagaggccacctgccaggaggaggctgtcttcaaggggcaactccaacagcctccctgggaggtacccctcgactttctgcctaggaaaggggaggcaaccaatggccaccatgtgtcaggtgctaacgaaaaggccacctgcctctccatggctaaaatgtggtctagggtctgaggtgcattctcagccatctgattctcaagaattcatcttttttcacttccactgacatgaattatgacatcagggagaacccaagggcagaagtaggggccaagtcctcttcatcacctccaggttggctgacaaacttggttgcaagtggccccatcacactggcctggtctttatctatggcccctttgtcagaggcgttagaccagagcaactccattttgagtaggggctgggtaaaataaggctgagtcctactgggctgcattgccagacgatgaggcattctaagtcacaggatgagatgggaggtcggcacaagatacagatcataaagaccttgttgataaaacaggctgcagaagctggccaaaacccaccaaaaccaagatggcgacgagagtgacctctggtagtcctcactgccacactcctaccagcgccatgagagtttacaaatgccatgccaatgtcaggaagttacactctatggtctaaaaaggggacacatgaataatccacctcttgtttagcatgtcatcaagaaataaccttaaaaatgggcaaccggcagccctgagggctcttctgtctatggagtagccattctttattcctttactttcttaataaacttgctttctctttgtggacttgccttaaattctttcttgcaggagatccaagaacactctcttggggtctggatcaggacccctttctggtcacacctccactgcccaatgccccctcaccactggctttcatgaaaaaggttttaacgtcttcgctgggccaggtcttttcatccagtctctgttggatggccaataacctaacgtgaacctcttcagcagcttctcccctgccctgaagccagcaggggtgggacacaggtgactgacttgactccctctaccctctcaaccccctcactaccactcacctcaaggacacaccctccaggtccactaacccccctgcctctctcagtctctgagacatctcactgcagtcccactcccctgccttcctctcttgacccctgctctgtggccatctgactaaaacccagagttggagaacctggtggtatcaccgcttactccagatggctgatgatctttatgttctggatcgggtctcaatccagaccccaagagagggttcttggagctcgcacaagaaataactcagggtgagtccataaagtgaaagtgagtttattaagaaagtaaaggaataaagaatggctactctaagtcacaggattctaagtcacaggatgagataggaggtcagcacaagatacagatcataaagaccttgtggtaagacaggttgcaatcaagaagtcggctaaatcagaacctggtggcagaaactggtgctgcgctgcctactccagatggctgatgtggcatctgtggaatgcaaagtctccctgagtcttttccccacgtcaggaagattgcttaagtatcagactgcagttgccagaataaatctaaatttattttaaatgttcatgtcaacagtcatatttgtaatgtttttttccttaaaaaacatgttgtacatatggatgttcgtcattgctatttatacctttatgcctgtctttattagctagggtaaaccagatcccagtaataaataaacccgaaatccagtggcataccaagggaccaggggaggtggtagtgttacaggaagggggtcccagtccagaccccaagagagggatctggatcttggaactcgcgtaagaaagaactcaaggcgagtccataaagtgaaagtgaatttattaagaaagcaaaggaataatgctccatagacagagcagccccgagggctgctggttgcctatttttatggttatttcttgatgatatgctcaacaagggatagattattaatgcctcccctttttagaccatatagggtaacttcctgacgttgccatggcatttgtaaactctcatggcgctggtgagagtctagcagtgaggacgaccagcggtcactctcgaggccattttgattttggtgggttttagccggcttctttattgcaacctgttttatcagcaaggtctttacgacttgtatcttgtgccaacgtcctatctcatcctgtgacttagaatgccttaaccatctgagaatgaagcccagcaggtctcagccttattttacccagcccctattcaagatggaatcgctctggttcaaatgcttctaacagtgggagttttctccctggtgagaaggaatattttaacactaatgtttagaattgctggcatgtggtgataataaaaagcagattgacttttagaccttttcattactgttttaaaattctgtacagacaatgtacccctttatcacctgcatccacttccactaccaccagcgccattggaacgtcactgccaaaatgcttactagccaaagcacaaagtctatgtgtgttacgtaacattccctatgggtgcttctgcttggtgggctcccctacatggtgatacagggactcaggatccttcgtctagggctcctccttcctctctccttctcccaatcatctgcatccagtaaggcctgactaggtcagggaggaagcccagacaatcaattcatggagagccggagccaggaagttgcacacagaacttctgctcttgtctcattggttaaaactcagtcacatggtcacacccaactgcaagggaggctgggaaatgtagtctatctacatttcatgtgctatcacaaacatccatcagtctttgccacaatgtcttaaatatttcacaataaagaaatgtcaaatgtttgtgttagacaagaatgtggataaactaccttctttctctagtataggaattttaccatgggacagatagtcatggttcaaagtcatgaaacaaatgatctcaaattttatactgtcccagtgaccagaatgctgagttcacagagctttccactgcctctttctcctactcagatgatttcccttctatctgagcacatgcctagactacatttcccagtctcctttgcagctaggtgtggccatgtgactcaatctttaccaataaaatatgaagggaagtgacatgtgccacttcctgacctgagccttacaagtttgtgtgcctgcttcgagttctttccccttcccattggctgcaaccctctgtgccccagcttccactgtgcagacaggaatagtatcctggggcagtgcagtgattctcaaacttgcagaatcactcggagggcctgtaaagacacagatggctgggccccacacctaaagttcctgattcgctaggcccaggatagggctggagaattgacatttctaacaagttcccaggtgctgttgaagctgccagtccaaggaccactctggaaaccactgtcctaaggaatgatggggtgcactatgaagaaacctgggtctctgagtggccccctggatcatagctgccttgacaacttggcagcgcagttgaaaaagaagtaaacttttgtcttctttaagtcactgcactgctgggcatctttgttacagcagcttaacctttaaccacactaacagagttgggattctgtcacttgcaaccaagagtcctgaccaatacagactcgaagcttaacttcagtaagttccgccactaagagagtttgcttcttttttcctgcttatcccaaacccgcagttttttcatcttaccttagtattgaccaggattccggaaggagatatgcacatgcaccaagccctaggaaggacctggaaggtggagaatattccactatgctacaatcttttcaaacattaacattattattatctcaactacttgcctgagtcccttgaacacaggcccagctctgaaatgtagttgccatggggtctggaaacagcccagacacccactcctcattggtgggtacctcttgtgctgttttcctggctctaggtgaacattcacaccgtgcaggtaaagaagggtgcaaatgcaggttatggggactcgtgtggctcaagctctaccttggaatgtgtggctcagagccctggggatcaagcttggcagtgggagaggaggtggggggaaggttccatggccctgagagaagaggactcacaacatcttcagggctctgtttcctgaggttaatgggccctcagcaaagcacttagagggtgtttctgtgtttctcttgcctactcctctgccatgaataggtgggccacaatggggtccatgtagaatagtgtttttcctatggtcatttagcaagtcttggacagagtccatttgagaaccaggcctcctgtctcccagcccagggatttaaaaaattatcccatcctagtttggaaagcagccatgtcccgaactgcaatatgggctctggcctttggaggaccagagagagcctagcaatggcctcttccacgtcctgaagaaagtactgcagggggtgggcacagtgactcacgcctgtaattccagcactttgggaggctgaggaggttggattgcttgagcttaggagttcgagaccagcctgggcaacatggcgaaaccccatctctacaaacaatacaaaaattagccaggcatgatggcttgtgcctgtagtcccagctacttggggggctgaggtgggaggatagcttgagcccaggaggcagaggttgcagagccaagatcgcaccattgcactccagcgtaggtgacagagtgagacccctgtctccaaaaaaaaaaaaaaaaaaaaaaaaaaaaagttcctgcaggcatgatatggtggtatttgacacctcttgtccgtccttggctttggggctttagctgtaaatctgagacaataggaaaagtcccatttaagagtctcttacatgtgtgtcatttaacttaatcctcatgacagccttatatgggaagtgtattaaagagggtaatgctagttgctatagcgaacagcccccaagatctagtggcttaacacaatagcagtttatctcttacctaatattgcaaggcaggtgtttgttcctggttggagagatttcctttacgtggtgatccgggtgacttccatgttgcagctttgccatcctgcagggctttgggttctctgcatctagacagacagggatggagaagctcacctacttcctcgaggccctgcctggaagtgacactcaccactcctgctcacattccattggtggagactagtcacatggtcacacctagatgccaaggatgctgggaaatgtagtctccagtggggcacatgtcttccagagacaattccacactatggagtcttttccagagttagtgcacaaagtcctctttactaatctgtttaaccagcttgccaggctaaccagcgctctccatgctctctgaatgcaacgctactgccccaggcatactgaatgcttatggctagtaagccattccctaggcccctggtcgcctttggctcttggccgtagaagagcatgcttgccaacagtctgctgggtctgttcccaaatcagtttgcacacagcacacttaatattgtaacaatgtaactgaattagatattccataaactgatgaaatatgagtgcaaaaggaagagatttgtttttctgaaaactgaatgaagactggttgctaaaaagaatactgtcaaattaggtgtggaagaaacaactacaaaacatctagaaaaaaaaaaacccacaagaatctagagggattctgcactccagttgccatacaaatgtctgcaggtccttgccccactttaaagaaaccagaattggccagggacggtggctcatgcctgcaatcccagcactttgagaggaattacaggtatgagccactgtgcccagcccctgcaggactttcttcaggacattataccagctttccttccctcaaaagcctccttagcctatataaagcgaagattatgaataaatgttaagggcaggtttctggaaccagacagcctgtatttgaatcaagcagtcctcctgcctcagactctcaagtatctgggacaataggctcacaccatggcacctggcttgaaatttcaacttaattcaattttaattaatttaactataaatggccacatatggttactggctaaggcattgggtagggaagctctgtgttacactaacattagcacatgtatttcttcacgtctcaggctctttctttgccttgactctttctagcccatgatgtcttgtgaaatgcaagtcctgcccccgttgattcagacagacagctcttgattccaacatattatgctgactgggaaagggaggggtggtccttggcaggaggaaaagggacaggcctctgtctgtagcaactgggctcaaattgccatatggcagcaactgccacctgtaacactgccatgctaagctcctcactggcagggaagggctgctgtcaagagcaagagctcagcagctggttccccctctccttggaattgtgactttgaaaaaaatctctgcatacttctgagcctcaatttccccatctatagggtggaattaacaatgcctactgttgttctgaggattaaatgaagtgaggcctgctttgtgcttggatcatactaactactcaatcaatgttctcgtttactctaactctcagagtcaccttccactcagaccaaataaacagcaggggaaaaaatagggtgggatggacagagagaaaatgttcttttaaaaagtgttttattggccaggcacagtggctcacacctgtaatcccagcactttgggaggccaaggagggtggatcacctgaagtcaggtgtttgagatcagcctggccaacatggtgaaaccccatctctactcacaatacaaaaaaaattagctgtgcatggtggtgtgtgcctgtagtcccagctactcgggaggctgaggcaggagaatcgcttgaatccaggaggctggggttacagtgagccgagatcgtgccattgcactccagcctgggcaacaagaacaaaactccatctcaaaaaaaaaaaaaaaagtgttttattgtgaaaattctcaaatatacatgaaagtagagagaatggtttagcaaacctctatactcctatcacttagattttcaaatctaaaacaaaccacagtaaaggtttttttgttttgtttctgtttgttgaggcagggtctcacgctgtcacccaggctgaagtgcagtggctgatggaccgacctccccaggctcaggtgatgtgatcacggctcactgaagcctcgacctcccaggctcaagtaatcctcccacctcagcctcccgagtagctgggactataggtgtgcaccaccatgccagctaatttttttgtattttttgtagagacaaggtttcgtcatgtgacccaagctggtcttgaattcctgggttcaagtgatctacccacctcagcctctcaaagtgctgggattacaggcatgagccaccacactcagcccagcgtaagggttttaataactccattaactcagagatatggatcctcatgaggctgaagaacaaactctcagtggctccaaggaaatggtcacaaacacatgttaggacctctctgagcagccctgcctaaaacccgttagagacagagtcttgttcagacaattgtcatttgtcccccaaataatatcctcatcggcctgggagcagtggtttcccccactgggtgtggctatgtgtttttctggtgatactcaagattccatctctctgggtcccccaaaccgtatgttttgtctttcagtgcccagaaaattatgagagaccccaaactcctaccagtaacgttgcttaaattagcaagagacagcttttaatttcttgtaacccagatccctaaatgacagtcaggctacagaaaagccacagcggccacctctaaggagctggcacctactgttccctgaggttaaaataatccattctttcaggagagagacaagagagagatgttattagggaacgtgccagatcttctggctttctggaaaattactgggctatagtctaactattagaaatcaatcccttaagatcccagtagccctggggaataggcagtgtggaaaagggcaaagaagaaattaattgggtggaggacagtactaacatttgctgggcatactctgtgctgagcagttcttcatacactccatttaatcctcacgggaacactgtcaggcagatattcctagccccaggtcacagacaaggaaactgaagctcagagaggtgaagttacttgcccaagacacaaccaaggtctggctaactctaacacccatgttcttctttgccactgccctaccctgtgtggccttaggtgagtctctctctctccttctgagcatcagtttcctctccctgagatgggaatggcttgcctggctcacagaggctttggaaggatctagactcctaagtgcttagaagcatgcccagcacccagcctgggactgggattgccttttttgtcatcctcaaagctgacaaccttggagctctgaaagaagaaaatccaaggccccgctgagggacgcgggtgtgcctctggggcgatgggacagaggaaaatcactgggttccctcaggtctccaaaggaggaaggaggagaggaggcagagggaggtaagctgaagggggaggtgcctcgggtgttgctgtttttggtgactgctcagctgacagctttccaacctgagaaacacacatacacaaagtctaacctcctctggcttaaaatagagccactgaaccaaaaatgccaagcacagggcagagtcatctgcctgacggagccagacagctcccccatggccccagtaacatccacccccagtgggcacacctgaccaagcgcctctcagctgcgcatcatggggccctcacaacagtgggcaagcaaagccagccacggatcctcggccccatcccggagacaaggcaagtgagagccagagaggcgatgggagggggataaagccagcagcatctggcctgacaaggatcatgacctggggaaccggacagccctgagttcaatcctggctcagccacagcctggctgggaggacttggcaggttaagtatctcttggcaggttaagtgcctctgtgtcctgggctgtaaggtgagagtcctgtgagtgatgtctgtgattatgcctcgcacaggcagagtgtttggccctgtccctgcttctggaaaaagaattttcgacatctgcacacagacagttgtgaaaaaggaggagaagcagctactggctaaggggcacctggatagtgacacaaaacagcttctataatcctctacatggtcctatggggtgagggtcattactacccccgtttctcagatgagaaaaccaaggcacagggaagtacaagtgttctgtttatggacacctagtggtatggtttggctctgtgtttccacccaaattgcatctccaattgtaatccctgcgtgttgaaggaaggacttggtaggaagtgattgacttatggaggcagttttccccatgctgttctcgtgatggtgagtgagttctcacgagatctgatggtttaaaagtgtttggcagtccccctcctctctctctctcccgctgctatgtaagacatagcttgcttccctttggtctctgccatgattgtaagtttcctgaggcctcctcaggcatgtggaactgtgagtcaatgaaacctctttccttcataaattacccagtctcaggtagttcttcatggtcgtgtgacaacagactaatacacccagctaggaagtggaggagctggaattcaaactcaggtcttattgactccagctgtgtccacaaccatgccctcattaactctcccctgagtgggccctgcccttcccctaagatcaggccattccccacatcccactgtctccacaaactcttttcgggctcttgttgggctgtgggtccttggagccccactcactccgactctgagacttcagcccaggtttctgctcctctgaagtctgagcagaaatcggaatattaaacttactgatgctgttgctaaaaatcaggctgaggtagtggcaccagcacgctgcttccagcccactgagcttcatcctgcttctcgggagaagaaggggtccaggccctctctaccaggtactggggcccaattctgcctgggaactgagtcggacaggcactgggttggacatccctacaggcccgggcgtctgctcacttgtgatatctgtaacagtggctcacacttctaaacaaatcctcagggccaagctcagctctccggctccacatctactggttcatttaatcctcacacccactgtattagttccctgttgccactgcaataagttattacaaacttagtggcttaaggcaaatgtattatcttctagttctgtagggtggagggctacacaggtctcactgggctcaaatcaaggtattggcaggactgagttcctttctagcggcttccatatggaagtatgtcctcctctgggacctggagggcctaggcggcaggctgggcctcaggggcttaacatacgtcagcgacttaatacaacagaagctcaaaactggggctcctgattgggggttgggggacaaccttgcaatgtgtcattcagccccaggtttttcccaccttgtgggctccctctcttctaaagactttagttctctgcattcagccgtctggtgggggaaagagatggagcacgtgtagggcagggttttatgggccaggcctggaagtggcatatgtcacttctgcccatgttccatgagctaaagcttggtcacatagaccctgctaagtgcaagaaaggctgggcaatgtggccagctgggcgcccaactccacctccccggtgcatcccggatcccctcatttctctccatcttcacacatttggactacactagccttcgaactggcctccactcctagccaccatcccttttccccatgacagccaggggctctttaaaaaatatgaatcagatcattgtggtggtgttgcgtgtgtgtttgtttgcctgtgtttgtaatacagcctttccatggctttcaataaacccacataagggcttgtaagaccctgtgtgaagttgcctctttgccttccttctgctcccccaaagtatctgccccccagttctctgggctccagcgacaccggctcctctgctattctggctgccaagtcatgctcagttctgttttaagcaccaccttagatggtggggttcaccttccccaagaaactatcccttttccttctttctcactcctgtcttaaattagtttcttgtttgttagctggccctcctcactaggatatcacttttacttacaacaggaatgttgtttgcaccagtaggtgcttggtaaatatttgtcagaggattgactgactgaatgaaagaaggaaggaaggagagaaggaagggaagaagagatgaagggacgaagggaggaagggagggacggagggaggaagggagggacggagggaggaagggagggacggagggaggaaggatgggagggaagaagggagggagggatggggaaaggagtgaaaggaaggaaggaaggaaaggagggagggagggaggaagggaggggaggggggaggggagggagggaaaaaggaaggaaggaaggacggaaggaaggacggaagactggcacgaggtcacaacatgagttagtggcgggaacaggacttctgcaggcccggggtttgggcctttgcttcagatctcactattcacagacacatgaaccccgggcaggcgagtgggaggcggacaggggagcggttcttccggcccccacccgtggcgatcccagcctccaggttcccggcagtcgccccgcctcgcccgtcacaaccctgccgcgtggggccggggttggagggggcggagcgcgcggtccgggcacacggagcaggttgggaccgcggcgggtaccggggccggggcgccatgcggaggccgagcgtgcgcgcggccgggctggtcctgtgcaccctgtgttacctgctggtgggcgctgctgtcttcgacgcgctcgagtccgaggcggaaagcggccgccagcgactgctggtccagaagcggggcgctctccggaggaagttcggcttctcggccgaggactaccgcgagctggagcgcctggcgctccaggctgagccccaccgcgccggccgccagtggaagttccccggctccttctacttcgccatcaccgtcatcactaccatcggtgagccgcccggagcctccctccgcgcccgctccagccccagccgtcccggggcgcctctgggtttcggtcccacctctgcccccgcccagctgagctactttggacgggtcatttcggctcaccgagcctccctcatctccttcgcctccctcgtctccctggtctcctttgcccccctctgctgaatggagctgtcagcccacgcaggcagggacgggaggaatcagtaaatcgagtttgccaaaaggctgacccaggagtgctcagaaaacgtccaaggggcttggagataggtgaagcggggctgggagaccaagtggctggatttgcttttccttgcctggttgcctcacacttgctgtgtgaccttagacgagttgctcaacctctctgagccagagttttctcttctgtaaaatagtgtcgctaatcggccttatctcagggctgtggtgagagttattattcaggagacagactatgcacagacaaggcctgtgctaaaacatgacacatacagagcactacaaagaaaagatcatttttttattattgcaattgttattgttaccccatgagaatggggacccagtctgtcttagggactgctgtatgacccgtgcctagcatgcagtagatgatcaataaatacttgttaaaggaatgactgataaccacaggctctggactctgccctcagggatgcagagcagttcctttggagcatctggaccaccagctgttgccatgactaccatctggctggtacctgctgagcctaaacctgggggaacaggaaggagagaagtgggctctgcagggctccaggcttggtgccagccactccccaggctccagctgtgaacgtcccggcaccccccctggggcttggatcaccagtccgaaagccagtgccttggagaaagtttccccataatgctcttgcaagtgaatatgagctgtggtttttgcagtggagttaaaagtatgagttctggaatcacagagactggagttctggtctcatctctattgccacctgccttctctggcaattgattccacctgtccaagccctggtttccccaaaggcaaaatgcaattgttcctacctcactgggtgactgccaggtttcagtgaggtcaagcatgtaacatgcttggcacagtgcctgaagccaagtaggcactattcatttgtaataattcattatttgccaacgtggctccagctcttattcagctcttttgccccctcctgtccacatggacacccctgcttcctatcttggtacacctgagaccctcctggttaccgtgcccactggtctgggatgccatcaacttgttctctctgcctttatctacattctttggaggcttgccatgtggttttggcctcttaccctggttctttacctctgaggtacgtctgggaggctgatgtaagagactcaagtggaaacaggaggaattttgccttttctggccacttgggggcaccaccaccctctgtggtctagtccgctgaagccagccttgcagagagccaggtgccaggccccaggaatttgggctttgcttggatgggagagaggcactgaagcaatggagggtgctggttaatagctcaggcctgtggagggtgctggttaatagctcaggcccgtggagggtgctggttaatagttcaggcccatggagggtgctggttaatagctcaggcctgtggagggtgctggttaatagctcaggcctgtggcctttgggcagttttgtccctctgaacctagttttcttatctataaaatgggaataacaacatgtcatatagtcattgggagggttaaatctgataatccatgcagagtacatacatgggttagttactgtcattattagttattatcattattcatttcactctctgccaaaacctggcacagtcccaaacagctggaagccttttattcctaaagagactcttctgtttctcaccagcacccccttcagcttggtttgattcaataaactctcattgagcttctggtctacgtcaggctctgtgcaggaccttggtgatggggactacaccaccatcgtccccgccctcaaagagctcaaagtctagtgatgagcagaccccctttctcccaaaagtaacagagaggcaaagtgatagggctatgcaacagaaatgtggaagtgcagccacaggcctttaaatgtatgtagtgctgatattctgaataagttatatatgcacacagtacacacttcacagggcacaaaagggtatggaatgaaaaggaattctccctcccaccctgtctctcagctcataaattcctcttcctgggtcaaatacagttgccagtttcttgtgtgtccttctggatatattctctgcctatatattcctttaaaacacacacattgtatagacgttatacacacagttttgtctcttacttttttcacttatagaatatatgttgatgtttttatgtcagtctctaaagagctgcgtcatcttgtttgtagggtttctcagcattggaactactgacatttggggctgtggggactgtcctgtgcattgcaagatgtttagcagtgtccctggcctctactctctagatgccagtagcacacagccatccccactcctcacccccatttgtgacaaccagaatgtctccagatgttgccaagtgtcccctcaaaggcaaaaccaccctcgattgagaactgctactctgtagtatcccatggtttggatggcactataatttatttaaccaggcccctttggatggacacttacattgtttctcattttcgctatgaccgacaatgctgcaatgacgacccaagtgcacacatatttttgctcatgtgtgtatattgaagggctaacttcctaactgtggaactaccttggtcaaaggatttgtattttttactttttggcaggtagggccaatctgttagaggaggcgcattcttcttggcctcctgactcttcctggcgtacaggctcctttgagaataccatgaaagcaactgctcctctttccaggaaaagacacacaatgagatacccattcattcccctgcaatggcgcggtgttccaggactcaagattgcccagtcgtgtttagattccctatagtagttgaagggacccagtaagaatcgccacgccagacaatcagaaccaaaaggtgttcagtgcgggcaggctgagcagtggagggggaggtagtcaggagaaaaggcatgtggagaggacatgctgactggggaagcagctcggggtgtagctggaaagtggggaaagttttgcttttttttcatcaaggcataatttacatacagtagaactcaccattttcctgtgtacactcctgacagatgaacacctgccgcgtaactgcagccacggtcaagacggaacattgccatcaacccccaaaattctaccatgccttctgtagttaagcctgcccccaaccccagctactggcaagcaaccacagatctgttctctgttgccacagttttgtcatttccagagtgtcatttatagggaaccatgcggtctgtaggctttcgagctcgtcttcctctactcagcttagacatttgagatccatccttggttgccgcaagttacaggagttcattcagttgctgaaaaaaattggtgtttggatgccccacaggttgtttatccattccccagtcgagggacacttgggttgtctgaagtttggggtgatgaatgacctagttaggactagtatttggagatgcccttccagccccggggacggggagggacacgccgggcaggcaggctgcgggcgggactgttgtcagctggagctgggcgctcacagccctcccctccgctctccctgcatagagtacggccacgccgcgccgggtacggactccggcaaggtcttctgcatgttctacgcgctcctgggcatcccgctgacgctggtcactttccagagcctgggcgaacggctgaacgcggtggtgcggcgcctcctgttggcggccaagtgctgcctgggcctgcggtggacgtgcgtgtccacggagaacctggtggtggccgggctgctggcgtgtgccgccaccctggccctcggggccgtcgccttctcgcacttcgagggctggaccttcttccacgcctactactactgcttcatcaccctcaccaccatcggcttcggcgacttcgtggcactgcagagcggcgaggcgctgcagaggaagctcccctacgtggccttcagcttcctctacatcctcctggggctcacggtcattggcgccttcctcaacctggtggtcctgcgcttcctcgttgccagcgccgactggcccgagcgcgctgcccgcacccccagcccgcgccccccgggggcgcccgagagccgtggcctctggctgccccgccgcccggcccgctccgtgggctccgcctctgtcttctgccacgtgcacaagctggagaggtgcgcccgcgacaacctgggcttttcgcccccctcgagcccgggggtcgtgcgtggcgggcaggctcccaggcttggggcccggtggaagtccatctgacaaccccacccaggccagggtcgaatctggaatgggagggtctggcttcagctatcagggcaccctccccagggattggaaacggatgacgggcctctaggcggtcttctgccacgagcagtttctcattactgtctgtggctaagtcccctccctcctttccaaaaatatattacagtcacaccataagcacaaaccaggctccagggtcaccctgtaggagcaaattccttgtagtccaaattgtatgagggcgtggccacatcagcacttaggagaggctctgcacaggtccacctcagagccgaccctccagagcaacttttctgttgtgaagaggctggttttctgagtaacggttgaaatgtgcaactttcaacactggaatcttcgctgcaattagtgaggtcagatgctcacactacgagaagcatggggaacaaaggtggaccaaatgggaccgtgtacagtccagtgttgacaagggggtcaatctcttgcgctaaacgatctcattctctgcccagtgtatagagtggaatcagcccatgtgtgaatgatggcctctttcccccagacagctgatgctctttgtccctggccagccccacttcaggatgagggaggccttgctgtcacccacccaccatgtcactggggccacttggacacagcagaatgccatgggacgagctctcttccgggtcctgtcaatcaccagcaatatgaccttggagaatcgcatcctctcccagggcctcagtttccacatctgtagaatgacggggttcatccagaaccctgctccctcttacgcatctctggcaggactttctggaacaggcccctgcaccataagggggcagagacaaagcccgaggtgtggcatcctggcaccccgtggcactcagccacttcccctggcttcccagatagggctgtctcaacacaaagcatgaacgagccaggttagaaaagccaaaaactttaatttcaacatgagctacatggtcatgaacacaatgcaacgcgaccccactccaacccaagggccccagaaaccctccctccctaaaggcctgggcggctgctgctccaagagagggaatgagggaaaggtgggtggatggagagaggcccccagcctaaggacccaggctcctgccttcccaccacccgtccaggaagcagtcataaagtgaaagggctccagaggtgatgctcacagccctgggttcggctccattctgacctccctgaagcgctgggttagacgggcaccatcagcccacctcacaggctcggcgtcgggtgagctcgtggacgctaatgctttctgtccactctgaggtgctgctccagatgtggggccctcccagagggcctcggagacaccataggggaacagggagaggggctcggtccctgggcctgacacagcactgctgctcaataaataaatgcaggtgaccttgcctgacgcaacagctgtgcctccagagggggtgggactcggtactgtttctgacacggaaatgcacccaggagctcctggctgaagggaattggcttgtgaagtacataaccaccccctaagccacctgctccacctctgggtgtaaaagagtgagctctgggctgttggagaaccgagttccagtcctgcccacccactaacacagtgggacctcaggcaagcactttcccctcccaggacctcagctccctgctttgaaatggggatgacggcacaggccaccacctactccccaggggctcttgtgagggccgaagggcacactcgagataaaagcattctgaaaacaaagtctgaaaagcacaacaggaaggccaggtctcactgcatctgaaggtttggggaggacttgcctgaaatgaggcgcccacagctgctcccattccctcactgccccaggcaggagctggtgtttcctaactctccctccagttggtcctgaagaggctatggccccttacaagggccctccacccaggcatcaaggtctagacccaatcctgtgtaccctcagtcagctgggccagcccccaaggagagctgagtctccctggcaaccctctcccccagacccaggcccagagaagtcactggtttatagaggtggagcccagtagggctgtgcagcccagggcttcgaggccaggaatccttgtcccagcagacatgcactggagcaacggtctcctgtcgcctgaagaacaatggagcccctagttcttccccctttgcacccttgctgaggggtcttgtgtgagtcacttcctgtttctgggcctcagtttcccaacctctcagatgggctacagcttgtcctgcccatcttttggggggccattaggcttcaaagaaagaagggaggaggaggtatgggcagtggcagccccacctcatactgccctggctccggctcagcctctattgggaggaggggacccaggctgggggtgccactgaacacacaggtgactccaggggtggcttttcccccaagctgggtcttgatttccttgtctgtaaaatggaaatggactaatggtcccaaaggcccttcaagggggttctggagaaggagagtggagatggctccttcccatggtatcctgcatgtgatcttggcccagagattgaaaacagtcatcccctggagaccccagccccccagtggcccctagtgccagcctctctgctcctcttcaaacagtgcagcctgagtcagcaaggggccaggcagtagcggggacaggatgggcttgaagcttctccgaagctaatgatgaaaatgtcactctcctccccaaacccccatcccttggtgaggacagaccgtagttcccacacccaatggtcacagcccctgggaaggggcacatgctcacgatgacacaaagaaacagggctccagcccccagctgctccacccctccaggaggtgagcgggatttcacagaacaaacaagaaaatcattgagggggccctcactgaccacccccaggtgttgttattgcttcggagctctctctctctttataaaggctgtgcagacaccaggggaagggctcaggctgtcagggccaagcccctgctccccctggttgggacagccaggctctgccctgtttttgaaaagctacccctgaacaaccacagcggtgatggctggagagagaaggcgctctcctggctcaaaatattccaatggtaagtaataaacgaacagcagagaaatcacactggttagaaaaacaaacaggcaaggggccaattctgtgccttgaatgcgaatccctccagagccctgctccttccacccccagccttgggattccacccaccgcggtcccaggaaactctgaagacctcctgggtaaagggggcgtctccatctccccttcccagtgcagggtaagcagctctgtggaggtgatatacattgaccagaactttaaagaatacccagggtttccacaggctaagggaagggaagaatttccgggtggaaggagttgcctggtgggactgggaccgggaccgggaccaggaacagggtgggaccaaaggcagcctgggtgtcctcaggagaaaacaacaccctctaatggagaccaggccccctctgccaaggtcctacaacccttaggagtccctcataaagaaagtcagtaccaagaataataaatcagaacagccgagtataacaggcagctccagctataaccctacggggacaagggaaggaagggggcggaggaggaggggctggcctcctgtgagccaggctgccccatctaggcccaggccagcgaggagacagtggtctcctggaatgtacttgaggctcctctccacccccggtcctgggactctgtaaggactatgcatgagctaagaacaggccccagggcttggagcactaactctacctagctaacctggactacgccctacacagcagggactaggtaaagagtggcaggcttctgggtgcctcccaggggaggtggcagaaatgtgcttctataaagaggggccagcctccatcctcccttgcatgcaaaagggctcccgcaggccccagggagggctgggctgggaaggcagctacccaggcctgctggaaaaggaatctcccagttcttacactcacgcctcttcacttttctctcctaccgccatctttccttcagccaaggtaattgaggccggggcagtgggttctgcccttagtataggatgttttttttaaaaagactaaaataggggggctctatttgcctccccagccccctggcctggaggcagggtgggtagacaggatgaccattgacctcatgcaacaaggaggggttctccaatttgagaaacccttatcttggcaccaccagtcccaatcccaactttccttagcctccccctccaatacagcacccccaaatgctctctagggttggggttctggaaactcaggttccacagctcctccaccggaacacagacgacaacattctttctagtccgccagcggttcctaaactagcttgttgcaatcccatggagcgaggcacctaggggtctgtgccaggcccccggcacctcctcctttcctttggtccctgctgaaccccaattcctagagccaccagaagaggggcaggcaggaggggacggacggatggactcggacaggctgcggcaaagctccttccacgggcaggcagagggaagctcaagctcctcttcaagtggggggctctgggcccctgggagctggctccggatccttgcaaagctgccccttcatctctggggcaggagtagctgcctgaacccggtgccgcaggaaagacacttgctggtaattggcaccatggagatggccggctgggttctggacatggctctgggcagcgagcttccgaggaggcaaaaagggggagaagttggacagtttgggaagggagagtggtctgctctgccacctcaatctttcctttctctggactgcagccacatccaccaggtcaagaaccggccaagtcaaaagtgtagccaatcccgttgggagaggggaggtctcgggggtaggaggcaaagaaggggtgaggaggggcccaagggggggcaggtctccccgttctgcttccccactgtgggggagagccccgtcctcctgttcaatgtgcccctgggcctggggtcccaggtcagggctgggtggtctccaggccatcttggggagcccctccccattccagcactaagatcgttctccgcagggccccacggtgctctcgagggacaactgggatgcctgccggagcagggggcctgtggctgggtccaccatggaggaggtggggaagagcttgtaccagcccacggccagggtggtcaagtccagctcctccagcagcacgcgagccacacccatgaactgcttccgctccatccgcccgtagttcccccacacgatcacctgtggggcaagagacacagtggttcaaatcctgccagtgccactcacaggcccagaagcagaacctgggtcgccccatgcccaatccagctcagtcctgtgatttctacctccttaaaactgcaattcctcaacaggcctttcttatcacggggcatcacaccaagcccctggcctccagaggctgttgatggtaatggtgacggtgacgatggtaatgggtagaacacttgctgtaggcaaaactgcaaatacttttcctgcacacagcacacattccactggcaccagaatgttatcaggtaggtactattagggtccccgctttacagatgaaggaactgagggtcagaagggaacttgttcaaagttgtgcagtaagttgtggagctcagttcagccacagtgaactgagggcctcgcctgtttcctccaggcgaggccctccagagacaccccccgccaggggtgccctcctctcattctggtactgtgcatgtgtgctcgtgcacacacacacacgtgagcgcgtcaatgcccctcacctggaggactttgccctggggactctcaggaaacagcagcacctggttatacagtgggtccagcgacttgcgagcgactttggtcttcttcttggcaatgcagatgccattctctagcaggtaggccttgatgtaggccgctggggatagaggccagcaggggtgagttctagtttggccctcaaatggtgggcaaagggtgcaacagagggaggctgcccaccctctgctggagataggtgtgcccccatggggtctggggaggacgcaccaggacacatggggggtgggcatttgggggcagcaggtacagctgggcttgggtgcagcctgccccacctcctctggtggtcctcactgtctccacccttcctttgctcactctgtgctcacctgtttcctctctcagtccataatgtgcccaccccctccctggcttatgcatctatctgctgaccccctcactcaccaagcctgagcacctactgcatgccaagaaccctgctaggcactggggtataatgataagctggaaagatggtccctgccttccaggagctcagtccagtggaggagaggaacaaggtcaacagacaatctcaactggctcttcaaacaaaccctaaactaccaattccacataagacatcagagttgggacagggggtccccacagttgggcccaattttctctcttcaaggccctcagtacccatcaggatatcctccctgacctccacccccaccttgcaggggaaggtaggccccagacctggcagtgtcttggagcctggcttggctgtcagtccccgagcctggataatgtccacctccaactgaccgttccgctcctgcagaccgatctccacatcccctggaagaggcaccaagagatgagactgggaaatggttcagaagctcaagcttggactcagctcttctcctttacttagggctgaaacccccttcccctgctcccagcccagaataagaccagaaccaactcccaccaagtgcctaggctctgctgagggcttgagagtgtgccctgggctctaggcggcatgcgcagaggatggatcaacaggcaaaggggaaggagggagagacgctgagcttctggtgtgacacccaactcccctagtccatttgaaaccagccttggggcactcacccatgggtgtggtggccagggtctggcggcccacaaactgtgccggccccatgcttcccaggaagtcactgaactgggcgtccgacgccaggcaaactcctccatagttaaggctgcaagaggaaaaggtgagacaaagcacacattcccagtggtttaccaacaactctggactcaagcagtcaacctccatgcaatggatatgctgaaacttccctcttgggatggagataaggtttacccagtatctggctcatgtggtttagtgccttgatactcaaagtgtggttcagagaccagcagcatcagcatcacctgggaactaattagatacatagaactgcagcccactccacccccagctgctgaatcagaatctgaattttaatgcgagccccagatgatgcccttgcacgtgaaagtgtgagctgcactgcaaacggctctagactctgaggggtgcatttcttgcggctgcttggctacctaatatccacttccccttcctctggtaacaagatctcaaattttctttacggaaccccctccccgtggcacatgatcacagtggggtggagggaacagctcctgagactgggcctccagctcagcctggccaatcagggcatcccttcccctcggccagtgatcagctcagagacaggcatgtagcccagttcagccaacaagaatcaggcctggaagctttgtttgaactatggggagtgagacgctctctttcccaccagacttgagcctgagatgcaggactggagcttctggtgctatgtagctaccatctggatcccgagaatgaaaccatcaaaatgacagcattgtgtgagctcctggatcaagctctgcctgaagcaagctacttcatcttttggttacgttaagtcaatatcaacagcaacaacaaagataattttattattttgcctaagacagctttagtcagttctccccactcccttcacttctctaagtatctctttcccatctgtgaaatgggaataataatgttcccatctcctaggtctgttgtattaagtgcgatgaggcactaagtaccatgcctgatgtgcctctgttatcctgagcaccaaagcacttgcaacccattttctcatctgatcctcaccacaaccacaggaggttttttttgttgttgttctggtttttgttttttttttgagacagagtttccctctgttgcccagtctggagtgcagtggcacggtcttggctcattgcagcttcgaactcctgggtttaagcgtttaagcaattctcatgcctcagcctcccaagtagctgggaatacagacgtgtaccaccacgcccggccaatttttgtgttttttagtagagacagagtttcatcacattggccaggctggtctccaacccctggcctcacgtgatccacccacctcgacctcccaaagtgctgggattacaggggtgagccaccacgcctagcccaagaggttggcttttgatctttatcaccatcttttaaataagaaacacatttgcccagcaaaagggtgaccctattccctggccagagatgaggcatacagagtcagaggcttaacccaagccaggccaatcaaaacctctctctgggaaataaaaaagagaatcctggagactaaaagtcacaagaactgagccatataaatggcctgccctcaggcaaaacccataaactctactagctacccagtcttggctgcccgattcttccctgaaccatttgaagtcccccagtgttctgtttttacttaagttatctgcagagttaatggcagaatattcagcctgagtgctttcccttttcctgatttcctactacccctggcttgctttccccattcagacagtagccagggtgtcctatgttggctgcctcagagaaggaatgacccagcaggaggtagagagcaagagacttgggctcttgacttttcagttccaaatctaagaaacagacttgaaagaataggtacaaaactaggctatcctgccccgaaacagacaaaccctcagcctgggagagcagaggaagtcaggcaaggagggaacagagctgagatgctgcaggatccttgaggacggtctgtagtctgcagctggtgagtgctgggggatgacagaaaactccagataggctggggggatctgaaagcagaggagacttgcacttactcttcttattgggtggagctaagaaaagggcagaacactttacagaaatggctacttgggcttcttgtcaagtaaccccctgggagatctctgaggctctctgtacatccctccataccctagagaggaacatatgatccaggtgcactggagagaagggcagatccatagaggcctggtggtctgggcaaagagaagtagctgagaccaatgagaaacaatgaccaaggagcagacagtaagatcacgttccaggagacaccaggatgatggatgatgattgcagaccacacactctgtccccagtgtctgagcaccacaataatagcagccaatgctactggacacgagccctcactgacattcagctggtacaccaggtgttatggccggcgtccatttgatccattcattcaaccaacaaatgtttactgagcacatactatgcactctattgtgtccaggcactattctggacacttggaatatgttagtgaacagtgatttctgcccttcaggtgcttagattctagtgacatattacacacaattaatatcataaacattacagtatgttagaaggtggtaaatgatagaaatcttagtaataaataagtagagaattaatgtgggcagggggggatgtgggcggcaatacaaaatagtgtgatcagtagctgtgacttgtgcttcttattaaatactttgatagttaccctgggcctgttctagaaatttacacagattctctccacataaacttccccaggacacaggcataacatttgggaaaatcctgaaccaagtgggtctaagtttccagcaaacagaggacacagcgggacttgatacagagattagcaacagcgaactcccagtgctcactaaatgccacaaatgtcaaagtgctctatacttattaattcatttcagcctcacaacaaccccatgaggtcaatactgttactgggcccattttatagatgagccggagagttaagaaacctacccaaatgacacaggtactgcatggccccaccctatccctcagcactcacctctatactttgaagctacctgctctcacacctgccactaggtctgagggcttattttctggctgtgagaattctgaattttgctggggaagcaaattcagcctgtggcacagggcaggctggaagcacctgagggttcatgcctcagaagcagcccccacccagtgacaaactgggagtctgcaggggggataatgcaggtgaatgttcacccagcctcccaaggctccccagtgggcctgagctccagctgcccttagtggtagcaggcttgatgacgcatccgttattagctcccctcccttcccatcccattccttgcagctcccacactcgggttgcctgggatggcctgccaaataaccagtttccacttgaatctttgaatcagggtctgctctggaagaagccaaaccaagacagaagctgagtggtatctgaacccagagagtgaggcttccaagtctattatcttaacaattatgcaacaatggtttttttatagacagaaagtatgaaaaaataaagtcacgtaagtgtctggggactgaaaggtatacccactattcttgcaaaaccaaagacccttaattaacagcacagaggctatggtctagaccaggggtccctaacctttttagcaccagggaccagttttgtggaagacaatttttccatggactggggcagggagtgggggatggttttgggatgaaactgctccacctcagatcatcaggcattagttagattctcacaaggagcttgcaacctagatccctctcatgcacagttcacagcagggttcatgctcctatgagaatctaatgtcatcactgatctgacaggaggcagagctcaggcggtaacgctcgctcgcccaccgctcacctgctctgcagcctggttcctaagaggccagggaccagtacccctgggggaggcccctggggttggggacccctgacctctttcacactggtgacatggcctttcctccatgcccctgggtctcttttccaccctaccctcccagccatctagggggccagcctccattttgtaaggagtgtctgggctccaaaagcctgagaaatggtgggggtctcacggattccaggcatggaaggagcgcagcctcccaggcagagggaggccctctgcagcctgaaattgaaagtttcctccaacgtcatcattgtctgcttctcagttcctggtgggattgtgagcagacaatggggaactggcaggcctggtaattagcggtaattgtttataatatctgggcggctgcctgatttcctatcccagggagccttgctagctgccaaggaacccggctgacgccccagaaaccctgaataggttatcacgtcctcctgggggctggaggaaggaggaataaagtggtggctgggccctactaggccagaaatccaactgcgggtcttccctggagtacacaagaaggcagaggccgcaaaatcaaatctgcctctacaactcactagccaactgcttgctgtgtgacctctgacaagttgttattgtctctgcatttcaatgttcttatctgcaaatgaaatcacactgcctcatggacagtgtctggcctttttgttggccagtgcctgtgctgtctcagtttcaaatgtttttcaaaatttctgcttacggcatccatgagcacaggggtataaaagagcttattgcattaagtgctgcatatgtgctacaactttgacaagtccttgtatgcaacaggagctcaatagatgttcactgccaaaccctacagcaggacttacactgggaaaataaaggatggagtgaagactggatttggcataacgcagaccctggatgccagtactgtacaacctgtggcaagtgtcttaacctctctgagctgcagtttcctcatgtagaaaatgggaataaatagtaattaccttgccgagttgttggggagagtcagagagctagtgtaggcaaggtgctttagcacagaggacctgctgagtgaatcaaagggtgagataccatggcctgctgggcctgctgcctggcctgggagagcctccttgccacattcttggcattttcatggcatttcagattctagacctgttagtaagtacagcatctggatgcctgagaataagcccaagccattctggggagtactgcagcagcgggtcccttccagggacgtgtgccacttggacaggcgcaaagccctgtaacaggattacaacccatgttctgctggccttttattttgtgttaatggtgaaatgagattccctgcatttcaaatcctattacttttgtttgtggagctgaaacccattggtcttttattattaacctctgagcttggtttggcccctggattttctgtgttcttgatggtgaaagaagtaactggctcacgcaggggtttgactccattctcttttccagatggatcactcgtctcaacagcatcagaaattaaaaggttgcacagcccttgtggtgattataggttatgtgattctcaaaggtttaggagtttacgggttccctgtccatccattcactacatgctcacctatccatccatccatccatttatccatccatccatccacctatcacttcatccatccatccatttatccatccatccatttatccatccatccatccatttatccatccatccatccatttatccatccatccatccatccatccacccatccatccgtccatccatttatccatccatccatccatccatttatgcatccatttatccatccatccatccatccatccatccatccatccatttatccatccatccatccatccacccatccatccatccgtccatccattcatccatccatccatcctcccacaaactcaccaagcctacaatgcaatcaattctgctgtaacatgaaatatacatttctaaaaattactgtgcaacgcaaaatcttgctataaaaatcacacagcttatgggaaaatggggtcagtgtcacatcaaaaacagaaaaaggcaagaatgcagtaaaaatgaaagcatggttttaaatatgttaaatgctttagaaatgcacaaatactacaataaaaatggcatttgaccttgaaaatgacctgcagtttgcttgtggaagtgggtgtcggaagaggtgcagcctgtgagtgattgtgaggtggtgagggaaaaactgaagtcaatggaaagttgtaccaccaggtgtggacaggtgtggcttataatagtaaactgagggtgccgtggatgtctgaggcgcatgtgttttgtgtattcttatgtgggtgcagttttcttcattcacccagtgctcctcgtggatgaaattgcacctgaacaaatgcaaaatttatgttatgctcaaattgttccctaatacttgaatcatgttggaacaaattctcgttttcaaaacaagtactgtagcagaattgccctgtgccaggatataccatatcatacaatcctgaccccgacttctcaaccattcaaggtatttccaagcctgaccacctctatgagactgtgtgtggctcatgggtgcaaagccaaggatttatttttttatttgtcaaaaactcatcttgagccaagcactgatagtactatttatcaatgttgatccatttaatcctcttaacaactctataaaagctaggtatttgtaattaatacccattttataaaatgggaaactgaggcacagaattgttaagtaattgaaccaaaatcactctgctaggagtggcagacctaggacttgaacctggagagtctggctccaggattcaccctcctaagcactgcgttatactgtctctatttgccctgaggggacctcagccttgcccagagcaaagcacagggatttgcaggtcaaagctacggggtcaggcaggcctggaactgaatcctgactccaccactcactagtcgtggaggcacattcttcacttctcagagccttggtttactccccaggaaaacaggaataaagaacaataggataatcccagtgctgttgtgagtattaaatgagataaacgccttagaacagagtctggcatactcaaatgctcaagaaatactagtgcttataaaacaaaacaaaacaaaacaaatccctgtctcctagccacagatgcatccagctctgctttgtcctttgggcacgggaatgctgctaaatagtagaggtggggaagaaaagggggttctgaccacccacccaggctcctgagcctttggtgattaggaaacagccttggtagaaccgtgaccctgagcccgggttcagtggccctgccactgccttacactctgcttccctgggctgtggacacagtgacccagacactcagagacctggatgccgatgacccagacatctcgggacaacaaagaacagagggaagaagcaggtgggtgctgggagccagcctggagcgcttctgggtcaacagagaggatgccaaggccctggattctgtgtgctgaaggggcgggaaggagtgaaatgtatgcatgcttctgctcacacacacccacctattattcatcagaatgtgcagagcaccaactgtgggccagctagacaggcattgaactcagtgtctagtgggacagacagacacacatgtgacaagatagagagtggagggcactgtggtgggggagggacaggggactgtgagagctgctgatacagccagaggaacggtaggccctacccgttccattccacttctgcccacgcccaggacagacattgctaatcaacctcagctctcctgccaagcctggacttggctccagaatccttctcaacacagcactccagggaaccactatcaattactggtgttggcacatgagatacagcctttgtgccagttctcagctgaggtctggagaaggaatgagtcagagggtgaagggggagcaggggtagagaaggaagtgccaggtagagggtgcaatggatgcaaagacctggaggtgagaaaagtgaagggtaaaggttcagggtggtggagtccccacatggatggggactgggagaggctgggaaaagtcagaagaataagtgctgggtggcaaactgtggtgttcaaccaaaaaggagacctgtaggtgtccaggcaagagcgatgtatggccttgaccaggagatggaagtggggaggaatggatggattcaagagatcattaagaataaaatggcacagcatgattatggattgggaatggattatggattggagagggggaactgtctgcaagaaccccagatttctggtttgggcagctggggagatggtagccctgtgcacccaggcagtgtagcaggctctgctgggccatccccccaccccttattatgtcagtgcttgctgacttctaaccgccagagtctgcatgcctttgcccaggcttctctggcccctgaagagcttctctagcctcaagagcctatgttaccacaggaagagccagagttaacagggagcagccactgctcagtaactcgttaagagctggaatataaatacctcagctccctcacttcctgaggagataactcccaggtgcatgtttcacatgggttccgagagttccccatcaggattggctctggttgcccaccaggaaagctggcttcttaaagcatgctttgttgggtgcatcacctctctcccacatgctcctctgctattattttctagaatcacctcccaggtgaatcacttgcacttgaacccatgtctcaggtctggttctgggaaaacccaaactagaacacacgtcaatagggagtatctcaggattagggcaggtggggagtatggtatgtctggaaggttctgttctcacggccccatctcagagggcttgagctctagctcctgcccttttcctgggtgagatgggcctggcctggtggcatggctggttgactctgcatccttaacccacagagctccaatttctgatcaggcagaaacaggctcaaggaaagaaagcccttccccagccccaggggatcaaccacaactggcccagcatgaggcccatggtgtggaaagagagaggggctctgggtccttgatggcatccttgaactaccaaaccatcctggaagcctctacttccaaaaaacttaataaatgcaaccattaaagagaaaaagagtgtaaacattaagggcagatacccaatgcccggatttgaatcccagctcagccactgactggctgtgtgacgtggggcaacttatttaccctctctgagcttccatttcctcatctgtaaaatgggaatattaacagtcccattgtcaggttgttgtgacaattaaatgagtcaatataagtaaaagcccagcacagtgtctgcacatagtaagtgttctctgcaagagttagccacggccattattaccattaagccagggcttctctaccttaatgtgcatacaaaccagctgggggtctcattaaaatacagattctgattcagtgggtctggggtagaggctgagattctgcatatttaacaagctcccatgccagtgtttctgggctgtggatcacacttcgaatagcaagggctgaagccattgtccattggtattacataacccgggactcaaggcatcctcactgacagagcgacccaacccacaggcaccccttccccatccctgacaccttgctgggaacacaacatttcccaagttttctatacctgtcctttgcagctctccccacactgctagttgcttagtcagtgcccaagagtggaagctcatggaggacaaggtatctgaggtgcctgacccaactgcctggcacattctaagtgctcaatcacatctgctgaaatgaaaatcctgtgcctacctgcaggaatacatacgcctggtgatccagcgcagtcagacagacccagcggtgccaggggctgcagccttgcgggggtgctcaagtggggctggctccctgtaagcctcagctgggctggcagaagcccaaggggtggggagaagggagaacagtcccttcctgtttcagagcccggcatttgggccaaaccagtgcccaaaatgcctacagaacaagaagtctgaccacagctcaatgtccccacccattccttctgtgtccctacctcgcccaggtgttgggcaggtggcagcgcctcgcctggctgggatccaccaacactcagctcttttcaggaggccaagactgtcccctgctgctggacccgtcaccctccaacccacctgatacctcctcagttgggctcagaacacccacctcaagccttttagtaatcgtaatcctcacagccaacacttactcagtgcttactctgtgctaagcactttatagacacaactgtatttggggtggctcactatatccgttagaatgcaactgaccaaaacagcaaaatagccaacaaacagtggcttaatgaacaacaaacaataatagctaacaattacagagctggtcactgtgctaagttcttttacatgtattaacatattgaaccctcacaactctgtaagtgtctgcactgttatgtcccctttctatagatgaagaaactgggctcagagaggtgaagtaacttccccaaagccacacagctactaagaagctgaaatgaaccacataccagggcagtctcgtttttgagtcctggctttgaacctgtctgtaattagactctctggtcccttaaaacccattacagcaaacagtaacaagagccatgttccaaacacctatcacctgcaggcatcacctcgtttcttcctcataacacactctgataatgctccccttggtcatgtggcctttctgagccttcatctcctcttctataaaacggaaatgcaggtttgacttctctgctgctgctcactgaagcacgttgcccttcccacaatctagtcctccagacctgcccgtgaggctgacagatatttactggcctcaaacatgagagaggtccactgatgtgctcaagcccacccaggggcatgagtggcagagccaggattaggacctgagcttcctgactccctgagactcacacctgtcagcagggccccactgctccccagatgctgagaatatcttcctccaagttctgctgccttgccatgtttctcaggttaaagaaaacactggctcccttcctcctcctcctcctcctctcccttccgctgtcctcctcctgttctcgcccacgggaaagtctcgctaggaggtgggtggaacagcagcatctgctaaggcaaggccattcacgaggctgaagatgcccagtttaggaggggctgggggtggggaaggcttttagccagcagaagcccccagctgaggggcagggccagaatgaagggaagcaaaagtggaggccaagccccagccccacctctcagtggctgtgtgtctgtccttgcacaagtcacttagccagtactgttcaaacgaattttctatgatgatggaaatgttctattttctgcaccacccaatatggttgtcgctagccacaagttgctagcgagcacttgaaatatggctagtgcaatagaagaacagaaagtttcatcttatttaattagccacatgcttctagtggctacttttctggacagttgtggaatttaacttttctaagcctcagtcttcccatgtgcacaagaatcatgatatcccaccccacttccctgactttagacgatagctaggaccatgaagcgatgcagtgctgggaaataacccctggctgggagtcaagactcctgggttccagacctggtaacacacttcatgatgcagagtgagctctttaacctctctgagtgccctggtcatctgtatgataaggaagttgctttggatcaaagtttctttgatctagggatccatggatggttttaggggactctgataacccctacagttatgagaaaagcatgttcgcaggactgtgtgtgggagaatgagggtgtacatgcactgagggctgtgtgtattgggggaaactgggcccaatgctttcctgaaattcttaaaggggtctgtgaaaatgagaaacccctagtctaggtgagttgctctagggtaaaagctttttaacagtggagttctcaggccacactcccagagactaagtcagcagcctggatgtggggtcctgcaagctgcactggtaacgtgttcccgtgattctgacgcggagcccacagagggaaacgctggcaaggagccagccacactactgtctagtgagctgatgctcaagaaatgcctttataaagcagtagtatacatttttcaaaaccaacgggatttaggaaactaaaaaagtaaagaggaaataatgatgataataaaacccctttctacccctcctttatttcttaagcagcactaatatacagcacttagtgccaaacactgctttatgctgtgtataaatatcacccctgcattatatggattgtaaacgtctaatcctcataacacccctatgaagctgatgctgttaatcccattttacagatgaggaaactgtggcttagagaccttgcccaaggtcacacagcaggaagggggtggagccaggattcaaatccaagcagcggggctcgctctccctcggggctttgctgttacactgcctcccttctgaagatgggggatgaacctggagccctgagctggcgctttcacagcctggagctgccctagggctcccagaggggttgctcagtccctcccgtgccccaccacaaaagactgcaagaaccaggagggctggtggccccacacttacttgccctctgagccatagctgttcatgctgtcctcaatggactcgtggctggcctggcgcagtgtccggctgggcatctccactgccaggcccgtctccgtgctcctctggatggcccccttcagcctccggctgtccccttctgggcaaagcggccaagagagatgggaagagagacacaggtgggagggggacagagagaagagtcatctggttagcagtgtttcagcagctgggggctgtccagcttcagcctccaccctcagcccatcaacctcctcagactcctggcctcaccagtaaccactccaccaacaaacagtattgcatgagttctgttaaacgatagattcatttacatgtgctttttctcccccttgaattcatttctcccctgaaatcttctccaaatcatttctcttcctcctcttcagctactatttattgagcacctactatgtgtcctactgtgtcaagtgctttgcatggattttgaccagggtttcttgacctcagcagactggctgtgtggatggcatattgctttgcagtaggggctgccctgggcatcacagaatgtctaacagtatccctggcctttgcccactagatactaatagcaaccctcaccccaccccgctgcagtccagttgcagcaataaaaaatatctccagacattgccaaatagcccctaggcagcaaaaatcacccttgattgaggactactcgcactgaaaccagatggcatgggttcaaatcctggatatctatctcagtggctgggagacttaaggcaaattactcagcctctgtgtgcctctatttgcacaactgtcaagtgggagaataacaggctcttatgaggctaaatggcccccatcagccgcccactccttccattctgtggtcaaacatcatcttatccaagatctttcttgacctctcctggcccctccaaaacagcagccttctcccaccccctgcccctctctgccctgactcctgctttggttttcctcctaacacttaccacccaaatgcgttaaacaatattggtgttttggccagcttcctctgcgaagaccataaactccatgaggacagggaattttgttcactcttgaagcctcagcaccaagaacagggtctagaccattgtagagctcaactaataactgtggctgccttgagagcagccttaatcctcacaaccaaccgtaaggtggatgctgctgttcacccccatccagtacccaaaacaggaggcacggagaggtcaggacttgtccacgcccatagagctagtaaggtggggagccaggacacagccccgggagggtgtctgctccctgctccatggcctagtgattcaagggactgtaggcttgctagaggtggggtagatcattagtgggatctttttcatggtcccacaaagtccagacatgggctgattcccaagaggatccttcaatgcttgctgattgacccactggggaaaagcagccccaatcacacccagtcatcctcctcctgccagaggacaagagagctgggcctgcgtacaggagcagggcaagccaggacagctcccgccggccttctcctggcctccctcctcctcccagctccaggatggtctctccttcctccctgcctctaagaatcacacacacgtgtacacacacacatgcatgcgtagatacaaacactctgtttctcagaacgtgtagcctcgtatttctgtctcccacgtgtctttgttattcagacacacagacacccacactcagaaaaacacagcaacacacacacacagtaagatgcatgcaaagacagtgtgttaatgcaggtctgagtgtgctcccaggggtctccacatgcctgtcgctctgtgtgtttgaggctaagtgggtaggtgtatacacatcttccctgcgtgtttctgaacacgtgggagagcgtgtgtgcccctatatctgtgtttctactccattccatcatctgttctttccctagcttgcatctgcagcctcccccgaccctctatctccactgtttctgttatttctctgtgtacagcaggtacagtgacacagagaaagaaagaaccactcacatgcacattcagaaacagactcagacagagatgtccctgtacacacacacacacagcactgtacatatgtccctgtcagacgtgcaggaacaaacaccccccccacaccccacactagggatacagacccatgactgggcaccctgcaggcaggcagcacacacctgcctcggctccctccctctctgctgagcgctgttcaggtgcccccaccccggatccatctccacctacctgggtctgacacatttctcccggaagagggaggagcagagcatgacaaacaactcagtcccccagagctgtgccttgcatctgtgtggcatcctacagccctcaaagcagttcccaaccaggccctaggatctgcctcccagcagccctggctccccacacaggtgagcatgcctttgcagtcagaaggcccaggtatggagacccggggcaagctggacggcatcttcccacggagctgttgagaggcttaaatgacagacgtttcccatagtgcgggcacaaagtaggtgccaaacataaaaagccaaaccactgcagagggagaaagaccttccaatgcccccacacctgcccttgccaactgtcttgctgacacccttgtagactcatttttttcccttgacacaccaccttccccaagctagggaccacgactggacccaaccacagcaatgtccaccatccaacctctaccacctacccctcctgtgcatcctctcttgctaactgggccatggcccccaaagtgactgttccagtgctttcccaactacccccaccaagatccatccatcccacgtggctgagatgtgttccctttgttctgctcttcctcacttccaaatgtcactgtgattgttaatagcgagtgtcaactcgattggattgaaggatgcaaagtatcattcctgggtgtctctgtgagggtgttgccaaaggagattaacatttgagtcagtggactgggaaaggcagacccaccctcaatctgggtggcatcatctaatcggctgccagcatggccagaataaaagcaagcagaatgtggaaagactagactggcttagcctcccagcgtgcatcttcctcccatgctggatgcttcctgctctcaaacactgggctccaagttcttcagctttgggactcagactggcttccttgctcctcagcttgcagactgcctattgtgggaccttgccttgtaatcgtgtgaatcaacactccttaataaactctcctttatatatacatctatcctattagttctgtccttccagagaaccctgactaatagtcaccatcctgacctttcaccctgcctggccctcccctcctttctgaaaggaaggggccgtccttctcctggctgtggctgatccatctccatcactcaccatgacctcctcccccatttgtcctctctgggccttgcgtctgctgcctctccatcctcgggccctttctagttctcccacctctttcaccaactaacttcctcggagaacagcctctggccaccaagtcacccaccacaccctctctgatctctcagtgtggctccagcccatcgatccatcagggcggcttactaaaccattctctagtgactgctcaccaccaggtctcaacccagctcccgggccctgaagcatggccctttcattctctcaacagacatctattgaacacccttttgtgaggtggaagcccctgagatgttaaacacgcttctaagtgctgcacctgctgataaaacacactgacgggagccagggagaaatgaacagcctctgcttgtcgtccatcaggacccagaaatagaccctcacttgacccactgtagtgaacaatgtgatcctcctccaagaccccctttttaccacttctgtgagcccctccccactgtagcatgctatgtgctgtggcttcccacagccagtacctggcacctttttctggggtggggtgtgggggtgtctttctttgggctactgagcccatgttgcccccacacaggcagagctagaagtgtctggaaatgtatgacccttaacctgcccttgccctgccccttcatcaaagactaaatgaaatgggaggatgaaccctcacctcctctgccctgggtcagaacaactctgaggcttcacgcagcccccagagtaaccccacagcggggctggggccaccctttcgggacctgcctgagagcacaccattgcgtgtctcctgccctgtcttgttctgcttccctgggtctgttctgggggcacttccttcattactgcctccacacgaatctcatctcagggtctggtttggggacacctgacctaagacaggctggcaccctaagcaagtaaaagttcaaaaatcttcacacaggtgggctcccgcatcataactgtagttgtacccatttacacccaaccagcacattgggaaggaaatttatttctcttttgtatgcttctatgtcatttgaattttaattaattctataatgcaaatgaaagtaaatacaaacaaattcataaataaatcacagcttcagtcatgccaccatcttatttaaaaccttagccaggcgtggtggctcatgcccgtaatcccagcactttgaaagacccaggcaggtggatcacttgagcccaggagtttcagaccagcctgggcaacatagcgaaaccccacctctacaaagaaaaaatacaaaaattagccgggcatggtggtgggcacctgtagtctcagctactagagaggctgaggtaggaggatcgcttgagcttgggaggttgaggctggttgcactccagcctgggtaacagagtaaaatcctatctcaaaacaaaaacaaaaacaaaaacaaaaacctcagaatgtttcttcactgcctgctgaattaggttcagtttttgcacccaggcatccaagactctccattttctgactccctccccatcagctactgctctccctcgcagtctctatatcctagcccagccagacacctcagtgctccatcctgagaaatactgtacatcctcaataacttcctcatcctggttctcactcctctcctttcctccttatcaaatttctaaccatcctccagagtttagctttaaataacacctataacttatcaggcactctgtacttcagtttcttcatcatataatagggataaaagcaccagaatctcagggctatgtgagcactaaatgttaacaagcaagcaacgtaaaaatgtaataacatataaccctcaggatggcctaggtgggctgggacacacggtcagccctcaacaaagttgactattattaatatggttattaccattgtgctagatgccatgccaagcgttttacaaaggtatctcccacttaattctcacaataaaccatgagatagctactgcccccctttacagagaaagaaaatgaggatcgagaaggttaagtaactttcccaaggacatgcacgactactaatggtggagctggacttcaaacccaggctattctggctccaaagccatgttttaaatgcaccctaaagtaaactctccaagctccatcccagaactcaaatgccatgtcttccacaaagacgtccctcatcagactccttgagtcccggggcacttcaatcttcacttctcttggggtaactattccatggcaccttgaaacacagttctcatccacctagtcgatgtcagtgtttacagcgtgagctcattcgtcatttacttccattcagcaccagggatagcgcccacactgcccatccccactgaaagtgtgttaaattgaattggctttaggatgtgtccccaagaaaaatggaaattctctctggtaaagaaaacaagtagatgtcactctgctgtttatacttgaatatgaatgtgtttaatgtacgttctcccaaaagcaagtattcataaggaacaggataataaaacgatgataaattatgaaaacagattctattgtttttagcatttaccctgtaccatgtacaaattatatacacatatataatttaaccccaccataacactgaaagacaagtattattatcctaattttacaataaggaaacaggctcagagcagttcagcaacttgtccaaggttataccagataagacagagctaggcttgaaaccaggtctgtgtgaaaacagatcatcatatactcttaaccacgagacctcagggatgtgttggggggagggagaaggagagaactcaaccagtccccactttgacattttattgaagatgggcattatcagctttgacttccagatgaaaagcctcaagccaagagaggctccatgacctgttccaggtccccaggctctaaaaccactaaccacatcctggtcagtgtgagtgtccactccaagtccatagagaagcctgtgaagttcccccagacacaagagctctgggtgactgggttattttaaaccaggatgcgaaaggcaccaaggcccctggctcactgcttccccttcccacagccactactcttcctgtatctctgagataaataccctggagactgctgcctcttcttcctccatggtcagcctctccctggcctagttattcccagtgacttgggcctcacatgcctcccttgtccaggtcttgaagtccatctgaaaatcaagggctgagagccatctgcagatactcaggcctccagagcactgatgttgcctctggctgtgtctccaaggatgggtggaggaagcacaaccctgattacttctgtgagggccctaacctttcccttctccctggagctataggaatctgccctaccttaaaataagagatggtttcatctggagggaacttagggatcatccagatcaatgcctttattgtacagagggcaactgaagcccaaagaggggcaggagttaaaggccatgttggtattagaattcaggctgggtacagtggctcatggctgtaatcccaacactttgggaggccaagatgggaggactgcttgagcccaggagttcaagaccagcctgggcaacatagtgagaccctgcctctataaaaaatttgaaaattactagcccacactgtagtcccagctactcaggaggctgtggtgggaggattgctggagcccaggagtttgaggctgcagtgagctatgatcacattgctgcactacagcctgggtgacagagaacctgtttcaggaaaaataaattctggtctcctaattgctaacctccctgctccttttcagtcaacagcctttcactatttctagagcatcttcaggaggcagcatggcctaatggttaaaagcatggacaatggagcctgaatgcctgggttgtaaacctggccccagtcactctattagttgtgtgattttgagaaagttactcaacctctctgtggctcagtttcctcctctatgctaactggtgtccacaccaccagagtgtcctcttctgccagtttcttctctactcagtggcctgcctgagcttcccaaatctcaatcctgaacacaccatccctttgattaaaacccttcaatggcaccccattgcttgcagaataaattccaatctaacacacactgtctttctgacctggtcccaatttacatttccatttccctagtgttctctacattctattcacaatgaattattccaaatcttccatgtgaccagctgcccctcaaatttcttacccatcatcctgcatacaaaagtcttagcattctcttatcttctggagaaaggtgctttttaagacaactgtttgttgcaggataatatacataaagaaaactgtacaattatatatcgcacagttgtaagtgtataccttgatgactattacaaagttctacggaaccagcacccagatcaagaagcagaacattaccagtgccctacagaaggcccacatgccacttccagttactttccaccaaaagtagcattaccctaacttctaacagcacagactggttttgcttattttgtagttttcactacataaaatcacctagtgtatattctttagcatctggcttcttttacccaacacgacgtttgtggggttcatccatgttgattgtttcattgcagttcattcattctcatgacttattgtagtacattgtgtgaatatatcaaaataattttcatctattctattgctgatgagcatctgggtgggtagcctccagtaatgagatattacaaatagctctgccaaaaacattcttgtatgtgtcttttggtgaccatttctgtgcagttcttcagggcacatacctaggagtgcagctgctgggttacagggtatgcatttgaaatgccttttaggtggattaaccacggtgtgaactggaaaggttaacacgttagactatcattcagcaggaagcaatgttctgaagaagtgaggctaaagattggaagattttgaggaaaaagatggtggaaagcctgttgatttactgtatatctggctcacatttatattccccaaatgtaatctttgttaagagaatgtgtatacagggcaaacagcacccagaacaggacaggaaggaggggaaaaggcctgtaatacagttgacattcaataaatactggctattactattaacctctctaaaggtcaatggtcaactgctcactgataccacctctagtaaactcattatttcatcgattctaagacaagcattttttcaacatctccaaaattaagatgtgaatggcaaccagtggcatgtcagagttaaattctgacatgttttagctcccttggtggtatataaagttgtgacttgcaactgaaggcctctaaaatgcgattaagtccacagcaaagaactggcgtgtgcaggaactgtccgtggtgctgactgagcacagaggactgggcctgcctagggcagaggtggggctcacaagggagattttagaactacgaagcatccctatctgtggttgttttcaaaccacaattccttcccactggcttgctggtgcctgaaattccaccctcaaagaatcatcttcccacataaagacaggaatttccatttatcgagttgaaccagagcctatgagaggtgctcagcactcatcatttcatgtaatcttcacaaccaccagtgaaggtaagtattgtcttcattttcagaagggaaagctgaagctcaggggttaatgaacctgcccataattacaaagctggcatgtgggatgtgatcctggttcaacgcaggccagagtgcaatttttgccctttacgctgctctacactggagggagggataagtgcctcagacctttttccaagaggatttgaagaggaaagaggagagatcataaagacacagagatgaagtgagtgaaagcaagaggggcaaaaggcacatgataaggatttgagaaccctagagagggaggggaaagattttgtgagaatcaactgggtaataaatatggaatgtgctttgtaactctaaagggttatgcccctggaaggaaacgttactctcacttatccaacaaaatatacatttattgagttcatttcctatgccatgctgttcttgtctctggggatttgaataagatacagtctttgaccttaagaaacttacaggtagtagagtgtgggggggacatgaaacagataagtaattattattcattcaacacactctttactaattgcctattcagggccagatcctgtgcggtagactcataacatagatgaattaaacccagaccttgctgaaactcccagtctaccagaatagataggcaagtaaaggggcaattgtgcaataattacaacgtagcataatgtaagggcagagatatacacagagtattatgggagctgaggagaagggtaattaatgcagcactggagttagaggcacggtctgggttgtaagcagaattgattcaatgctgaattatacttgattgcaaataaaatcagaagatttcattgtacatgcaagcactaccttccagtacaactgaaggttatactgacaaataaaaacatggagatagagtgaagaggaaaatgtggaaccaaatgaaaactgaaggcaaaaagttccagatgcagagtaaatgcatttggggttggggaggtcctatgctgagcaggggtggtcaggggaaagtcatttactctcctcgagccaatgtggaaagactttctaaagaagaggcatttccacaatcattggaaggaagacaattcacagtcccacaaaaagctgtttttcctcaggaagctatttccatcagcatttgggacaagctaaacaagccttggaaggaactgggttgtgggcaaaaggtagagtctatggccccatatggcactgggaagctacacaatccacacagcattcaagacttccaggatttgccccaaacctatactacaagtctgccatgatgcacataccaggtgttctatccacacggaattactcatcattcaccaaatacagcccacgtacttccgtcttcttaggagaacaggctctggagccagaaaaactgagtttgggacttgaagcatgcctctgccactttctgagtaaactaaataaacttactgaactaatctgagtctaagttcccctgcaaaacaggaaaaatgatagaatccactccacctattgttgtaaggattaaatgtactagtaagctcttattaggttatgctgcaataacaagttacccccaaatttcagtggcttacagaacaaagttcttgttcatacttaacataccttatttttctgagatggacttttgctctgtggcctatactggagtgcagtggcacaaccttggctcactgcaacccgtctcccaggttcaagtgattctcctgccttagcctcccaagtagctggggttacatgcatgcaccaccatgcctggctaattttttttttcctttttgtatttttagtagagatggggtttcaccatgttggccagtttggtctcaaactcctaacctcaaatgatctgcctgcctcagcctcccaaaagtgctgggattacaggcatgaaccaccatgcccagccatacttaacatactttacgagttagctatggttctatcccacgaactcatctgggacccagggtgaaggggcaggccctatctgggacaagctggtctcatggcagaggaatgatggaaccatgagggaattcttccagctgctgcacttttctctatgtgtatttcaaaacttttaaaagaaaaggaagggaaagaaatatggcctctaacagacagatgctgccaaacatgtaggggaggcaaggaagctccctcctctccacaaacactggaaagagaactcctcaagacaccaaatggtttgttccaacaaggtagcatattagcccatgatagcacagatccatgttaactgtgaaatagatctctcataccccttgtgggactgaactcaatgacataacatgtgcacaacgactgtcacagtaagatacaggcactcagtaaattgcagctactattataaacaatactctgagatagagagtagtgtccctgattctcagaaactctcagaaaactgaggctctgagaactgaagcagtttgcccaaggtcccacagcaagtaaaggttggagaggaagaatgcaaaacaaatccgctccattcaaacaaagctgcacacaaatgttcacagtagcattaactgtaacagtcaaaaagtggacacagcctgaatggccatccatggacgaatgaacaaactgtggtatatccatgcaattaagtattattcagccataaaaagcatgcagtactgggccgggcatggtggctcacgcctataatcccagcactttgggaggccaaggtgggtggatcacctgaggtcgggagtttgagatcaccctgaccaatatggtgaaacactgtctctactaaaaatacaaaaattagctgggctgtggtggtgtgtgtctgtaatcctagctactcaggaggctgaggcaggagaatcacttgaacccaggaggctgaggttgcagtgagctgagatggcaccactgcactccagcctggttgacagggagaccctgtctcaaaaaaaacaaaaacaaaaacaaaaaaaaaacaacaaagcattacctatacatgcttcaacatatatgaaccttgacattatgcaagtgaaagaagctggtcataaaagatcatctcttctatgactctacgtatttgaaatgtccaagataggtaaatccatagaactagaaagcagactagtggttgccaaggaccagagggaggggcaaatgggatgtgaatgctcacgggtatagggttgacgataatattctacaattgactgtggtgatggttgcacaactctgtgaataaattaaatattaaaacccactgaattgttcactttaaactagtaaactgtatggtatatgaattatatctcaataaagcttatataaatctccttccacttcatctcatctcccaggccaggctgttaaccctattctacactgaccccaagagggtcaaggagcccacaggcagggaggctccccctaagccagaagcagtgtggaaaacctgctgcaaaggccagacaaggccaacttgtacagtctgtcccctcggatgtcatcttcagataacacatgtgcacatgtatccccacaaaggcccacggatgaaaacgtgcagtgggtacatgggaagcagagatgtaggggatggggtggggttggaaatgagggaattccttccttccagtcccaccagggcaagcctcaggctccccatcaccaccttcctcaatcaacagatggccagcttcctccagagcctccaagactagagctagcaaggcttagttaagaccacctgaaaccacctggcaccagcactcaccagagcaaacccaccttggactagctgttctcagcactgaggctgtagtgatgttggccttaggcagcacatcccctgttgctccagcttggctcatccacgtcccaaaactgcttaaaatccgtctctctccagactgttctgcaggatagcagctaacccagtgtccactaaggcttctcaagaacctcccacatacatgcttaacgcacgctgggtctcctactccttggatgagcagcgctatcctttatcttgaagcagtttaaacaaatctcttccttgatttggccttagcagagttgcagagaagctgggccccaccttggctaaggcacctcccttggttgcttttctctctctcaaatgagggcagggacactggctggcactcagcaggtcctccacacagacaccaaaggctgaaggaattccagctcatggcttctcaactttaatgtgcaaatggatcacacaggaatcttgttaaaatgcagattctaattcagcaggtctcaggtggggcctgagattcagcacttctcacaactcctaggtgaggtcaatgctgctggtctgtggcccacacattgagtagcaagattctagcccattccattcactcttttctgatttctctgccttcttcattgttcaaggagcctcttgggagtggataaaagctactctctcttagaaaaggacctgccagcacatacacacagtatgttgcataaagtttgggagcctgcaatccctggattaaaagccattcttcttctttttttttttttttcttttataagagataggctgtcacccaggctggagtgcagtggcacaatcacagctcactgcagccttgacttcccaggctcaagtgatcctcccatctcagccggtactacacaccaccaagcctggataattactttattttttgtagagacagggtctcgccatgttgcccaagctggtctccaactcctgggctcaagggatcctcctgccttggccttccaaagagcttggattacaagcatgaactacctaccatgcctagcctaaaagccattctttcgcatacacaaacctgcaaatcttagttcctgcagaaaagaggatgcaacaggggatagaaaaagaaaaagccttggcagggagtgagaactcctgggtcttgtcccagctccactactgacttccggtgtgacatcagacaactttctgctcctctcttgagcttcagttttcccaccatgagagaagtggactagattggggatgatacataggttttcttttttttttttttttttgccaactctggtagctgttgcctgaaataccctgtgctaagaattcttagactgtgcctggacttggcagaaaaggatgccatgattgattggtgatgcctgccatggtcccaggaaagggggccttgattgattggtgttgtctgccaagatcccaggcctggagggtgatgggcttcctgccagatgtccgcctaccccagagagcccttccagctgtgacattccacacagctcattcagagtcatgccacactgggcaaagagaagtctgtgcctgtcctcaagggggcaggaagggataattctttaagcttctggcttctcaaacctgctgccctacagccccctttgagaagaggtagcagaatccctgctcagtggcagaggacagcatgtccttgtgctcccatccttccctatttttaactccaaggacagcagctcaggcagaagctgaaatatggaagggccacccagcctctgagggaggggaaccacacccccaccatcattcccaaactgctccatggttggccaagtgagagtcgaggcaagggacagaaggttcctcacctcccgtgtgaatctctcacagccccatcccatccttccccaggcagggccagtcacccctccttggtacacccacagacctctctgctagtccctatcctgctgcaccctgtatttgttcattcatgcaccccatttacatatatgtgccagccttcatactagtgccgaggacgcagcattgaacaagacagatgggggtcctcacccactgagctcttctagtctagggtggaagacagacagcaaacaggatggcagcataattctgtagttacaactatagtctaagtgcttagaagagaactgtaccatggtcaccccatgtgcctgtacactcctcaagaactggaattctctcactcatctttctatccctggaacctaaggcctaagctggcagaaaggagggttcagagattatttgttgattgaaaatattacacaagagacatcatgtgaagtttgagagccctacaggagcctgtctcagactagatgagattcattcattcattcactcattcactcacaaagtattttttttgagcactttctacatgtccaacacggttctaggcactggacctagagcaggaaacaagacaaggaaaaacgaactgtcctcctgaatctccatgctaggagaggcaagcaaacatcaagccagacaaatacagaaagatagagaggatgctagaaggcaataagggcagggataggagtttctctctgaaacagagtgatcagagaaagcattcccaacacagggaacagaaacgtaaaggcccgtggcagacatgtctggtatgttcgaaggagacgagagtggctggagcagacagagcaagggggagtggtgtgagatgaggtttgagatgatggggcaggaggagagggcagactgaaaaactgacacacctcacaccaagctggcatacaattgatggaagagatggtggcgatgatgataatgacaatgacgatgtgatgataaaagcagctagcattcattgggcacgggtgacaggtgctatgctactcaattaacatggatttgtttatctaatccccacaacaatctgtgaaatatgtcttatattatacccattttatagatagggaagctgaggttcaacaaaatttacgcagcctggaggtggcagggctgggacgggaacaccggccgcctggagccaaagtccactggcttgctgatcacaccctgtcctgttccacatgcaccatgaacaccagtttcctcccctcccagagttcctaaatcttttggactcctttgaaaatctgctgggagctgcttttccccagagaaaagttttggttttctccaggaaaaaaaaaaaaaaatagagatgcacaatgatacaacttgaacgtaatttcaagaggttcaaggttataaactccagccctaaaagtaagcattttataagcatttataacaaaaacaagaattttcagagttttccaaagatgcaataggggaacacaagtgtctgcaataccagctaaaaccacttccatacaatttgtcaagagcctatcaggaataaggcacttgtagaatcgtatctcatttaaacctcattttagtcctgtgaggtgattataattaggatccctttacaaactaggaaactgagacacacaaagtttaagtaacttgcccaggctcacagaggtggtatctggcagaattgaaattaaccacagatctagctggctccagacctcagtctctattccagacattctcttctggcttctccaatggcatttcttcatcttcccagacaggggaagaaacttgctcaaggtctcacagctcagcacatctggagtagccattagccacatgtgaacacttaaactttaaaaaaaaattaagaattcagtcctcagttgcagggatcacatttcaagtgctgagtagccacctgtgactagtggctacagtatcgcacagtgcaggcacagaacattttcatcattgcagaaatgtctattgggcagcgctgggctagaacttggtctcttgactgccaattttagtttttccactgtcaggggctactagaaattagatttgcttgataaatgaagttgaccatgaagaggagacaggaggtgggtgcagtggtccatacttataatcccagcagtttagaaggccaaagcaggagggtcatttcagcccaggagttcgagaccagcctgggcaacatagcgagaccctgtctctcaaaaaattttgaaaactagccagtcaaggcggcttgtgcctgctgtacaagctacttgggaggctgaggtttgagcccaggaattcaaggctgcagtgagctatgatcacaccactgcactaaaatctgggtgacagagaaagaccctgtctctaaaaataattttttaagtgggtgattttactacccacttaaaaaaaatgatactgatgatgctgataacagtgactgccatttagtaataactttttcacaatgtactccatcaactggagcagggctgggcatgtattaagcactcaataaaaatgtcttggatgttgaatttaccatgaaaatgtcttacagaacagtaataataataaattactatgaagtgaatgccttacggctgcactgcacccaaccacacttagtgtcataagccttccaataacctgaggggtaagcactgttattgtctctatttacaaatgaggacaccgagacacagcaaggttatgtcatgtgtttaaagacacagctaacagggtagaagaaaaaaagggagagggtggtttaaatccgggtctgtctgaatttaaaatctctatattttttacctcccaaatcaagagagcattttgtgtacaacaaaggtctgtacaaatgtcacttaccagtatcatcacagtatgagaatttctttttattattataatttttttgagacggagtctctctctgtcacccaggctggagtgcagtggagcgatctcggctcactgcaagctccgcctcccagttcacaccattctcctgcctccgcctcctgagtagctgggacggcaggcacccgccaccacacccggctaattttttgtatttttagtagagacagggtttcaccatgttagccaggatggtctcaatctcctggcctcgtgatccgcccgtcatcacaatatgagaatttcttatttttttgagagatagggccttgctgttgtccaggttggagtgctatgacacaatcgcagctcactttaaccttaaacttctgggctcagcaatcgtcgtacgtcagcctcctgagcagctaggactataagcacacgccaccacatctggctgagttttatttattatagagatggtggtcttgctatgttgcccagcctgggctggaactcctggcctcaagcaatcctcctgccacctcagctttccaaagtgccgggattacagtcatgagatgagccactgtgcccagcccaacatgtgaagattaatgggcccagggagaagaaggattttccacagttgagctgcctgtcaacagaatggggagattgtgagctctctttcctgttgctagaggcacccaagggagaataaactcctacccagcagggagactgggatgggaactgagctgtggtccccaggtgggacactggatcagcacagagaatcccaaatgtggttgaacatcagaatcgcctgggagcttgtgaagcaacagagtccaggctgcacgcctgatttttaattgagtggtctgggttggggatcaggatcctggctgctgacgaaaggcacatgcagcgcaggttgagagtcatggactagcaaaatgctgagtgtccttcttacccaagatcactggattacaggccacggagccactaaaggaactcaggacacactgttaaaaaacatatgatttgcccaataataatgaaggcatgctctggccaggcactgtgccaagcatgacacctgtggtcccatagacccctcctcccaggctacctcctccccaggctcctctaccctccttccatttttcaactccagcatcctctcttccaggaagcctcccctgattcccagagctggggacctctccttggggtcccacaacagatatgattctcacttgtgaatgtccgcgtctatgtttacccgctgccactccaggctgtgacaatgctagtgtctcactcaagtccttgtgcccagcacctagggcctggcccagtgcaggtgctcactaaacatctgcagagaggacttgctctgctccatgaaggatggacagaggaggcagtgaagaaagcagccgctgcaggaaggaagtaatccaggtcaccaggttggaaggagacagaacctacaaattctccccgccactgttcagaagaggcctgggctatttatagctcacaagccttctgcttcttgcatttaaatgcagggccaggcatagaataaaatcctggggaggtctgtcagttttcaaatttatttatttattttctataagaacgggagcagaaagcagggacaaaaatgaaccatgcctattagggtgcgctgcctcgtgctgtccctaggtctgccttgccaagtctgttgacagaagagttgcacgcagttctagacctgatcctagaaatcagagtatccctgtggagactggcctgtgaaggtccttttaaggtgatttttaaatggtagcttcagcttacaaactagtattacagcatgaccctgctttggtttaaatatgtgttgtgtgtgtgcacgcgcacgcgcacacaccccctagagagaaatagccctagtggtgaagcattctacttttggattatagaatttgagacattttaattttcttttggtgtgctttctctgcattttcccaaaattgccaccatgggtgcacatagcatatacggtgttatgaggatgttagactcaaggaaaccagctctgccacttgctagctgtctgaccttgggggaattacctaatttcttcatctgtaaagtgggaatagcgacagaacctttcttagaggtttgctccaaggattgtataaggtaacatatgtgaaatcctagcacggcatctggaatgtggcatgtgctcaggaaatgccagctagtataactggacaagcatttgtaactcgtgaaagcatgataccgtttttaaaaattaaaaccacaaatggcgactctcccactcccgggtgtggaaggagccctgagaagggactggatcatggctggctgaggagggctgagaggcctgagttccaactcgacctgcctgaaaatgcacaaatgactccttctcctcttgatcagttttctgactttgaaaaggatggtggtaaggggtggatgttaagtcctgctcctctaagcagaggccccagaggcctgacgatgatgctataactcagatctccaagaaggagctgatcgtggtcccacccaccccctttcctagctccatttcttccctgtgtccacttcctaatgtacctgctttgccccactgagacgtaaataaaccccaggaaccttcttcctaatcacacaggaccccagtgatctggggcaccttccccacatccagcctagtaatcagcctctcacccttcaaggtgggactcagcactctctgctaaatggaatcaccgttatctgctctgcttgtctttcctcctgggctgagaaagtcctggtcctatttagcaccataacttcagtgcccagcacactggagtgggccagtgatatctgttgactgcataaagaatgctgtaaaatatgatccagggcagtgccgagcagtgggtgggctcacagactcgagtgtcaggcaggtcagtgtttgaatttattattataattttttttttttttgagacagagtttcgctcttgttgcccaggctggagtacagtggtgtgatctcggctcactgcaacctccacctcctagattcaagtgattctcctgcctcagcctcctgagtagctgggattagaggcatgtgccaccatgcacagctaattttgtatttttagtagagacagggtttctccatgttggtcaggctggtcttgaactcttgaccttaggagatccacccacctcagcctcccaaagtgctgggattgcaggcatgagccaccgtgcccggcctgaacttactattgaatggccctgggccaaagatgggcctgtcctttctgagctttagtttcctcatctgcacaatgggtatgacaatggtatacccctcatagtctgacatttcagtaagattatccaggtaaagtattcagaatacctggcatatatgaaataataaatattactatcataatgagaatgattattaaaaatgtaaaatgacttggtggctatctccagaaaccagtttcagcactttcctttcagatctggttcgggtctgtggggtcagaagaactcccggacagagtgctccctgcacaaaaatgcccgactgagaaggggcacaagcagaggtacagcctgttttcccttacccagccgtgcaccctgctggcactggagaaaggggaaccttgttctgattcatcctcctagaggaggcagcgtttttaaaattcaaccaccaggatgggggtagggagagaagtgccttcctctaacttgcataaggatgccatataagcgctgtgtctggaccaggtcctcattatggggccacgagaggaagggccaccctgggctgtgctcactctcagttctaaggataacacaaaggcccctccaagattgtgcggcccagggcaggagtacaaatggaggacttcatacttattctaaatatgtaaaagtttaaatcaggctattaaataaaatatgttctatcttttcattctgacaaatatgtcttcataatgaccttcaaggccaggacagctcaaatttagaatcctccaagtgccacagatgaatgcggagggggagggagccaaccctcagccatggtccaccctttctccctctgctcccatatccagagggctcactctgcacatctgtgccggctgtcgcctccacaaacagcaccttcagggccaccctcaggatactgctgatggatgcatccatcctcaggagaatgaagccagggaaggggttgagacagaccctgaaagctgactcagggccatttgggcagggaatttcagggtccccacgtctagaacaggcctagaaggaggagttcaggtgggtaataagagtgaagccagaggcctgactggaggagggtcagagaacattccagtaatgctggcgacctgagatcagggccctccttgcccaggtctaaaggtagaaatgaaggctgggcatggtggctcatgcttgtaatcccagtgtattgggagaccaaggtgagaggattgcttcagcccaagagttcaagaccagcctgggcaacatagcgagattctgtctctacaaaaaaaataaaattagctgggcaggctggcatgtacctgtagtcccagctttttgggacgctgaggcaggaggatcacttgagcccaagagtttgcggcttcagtgggccatgactgagccagtgcactccaagcctgggtgacagagtgagaccctgtctctaaaaataaaggcaggaatgagacagtacccaattctaccgccagccaggtctgatattcaccaaatgggtcatgagaaaactcacaagaggtttataaggggtgattcctttgggaactgtggtctccaatttttaccaaagcctttcccaaatcaacagatgtaccaaccacttgggggtgaggtaggcatgaagcttctctcgctttcttccccagcaaggctcagattgaggagtcgcatctgtaggccccatcccagcctgggccttttctggggctggagacattcagaccccactcccaattcctgaccagggttgagttcgtcaaccattcaaacttagccttaactaaagagcggttttcctgtatttttttattttaattttttaaagacttagacatttacctctggagagaaattatgggcttcaagagttcttgacaaagagcttcgttccagaaatataaagccggcattttaaatttggttcttattcactgctggaaagtattagaatgaagattacaaatttaataatgtaacacggcaggaactggcctggccttgtctccaggagagtaatttgttcctgccttcaaaccggcacttcccagcctcccggcatcaccagaccagcctggtgccacactgctgactttttttgtctcttgcgcactggcccacgtggccagcccagacaccaggagatatcactatcctggcctgagaactagggatagatggtcagatctgtctggggagagccactataaccaaagggagccatctctgggtctcttggcttcactccttgcctgcggccagagaggtatttaaagattggcaaaccccaaatctgagtttgtcacatccctgctaaaaacccaagaggggttccaactgaccttaagctcaagcccaagagcctcacctttaaaggcctagtatcatccagttctgctacctcccaacaacatacccctttccctgggctttcaaaagaccatggcccactcctgcctcagggcccctgcacaactgctaatactaacaagagctaacatttattgagcactaattatgtaccacgcactgtgctaagggcttcacaggtgtcctctcacccctaccctgtaaggtaggcaatggagccaagtggcgaagctccagagcccaaagagctggacttgaattctgccttggaccctgtgtgatcttgggcaacttacctaatgtttctgtgcctcagtttcctcatctataaaatagggatagccagccaggcgcagtggctcacgcctgtaatcccagcactttgggaggctgaggcaggcggatcatgaagtcaggagatcgagaccatcctggctaatacagtgaaaccccatctccactaaaacaaaaaattagccaggtgtgatggcgggcgcctgcagtcccagctacttgggaggctgaggcaggagaatggagtgaacctgggaggcagagcttgaagtgagccaagatcgtgccactgcactccagcctgggagacagagcgagactccatctccaaaaaaaaaaatagggatagcccccaaaacaacctcacagagtagttttggggctcgaatgagtgaatggaagtgaagtgtcagaatgcaaggggtgccatgtgagccatggtaattatctgtatcggccttttacacagagagaaacagaagcaccaccaagtgaaaaataatgtggaacaggtcacgcagcagctaagcagagtgtggtctccagactctgaagcccttaatttttaccatgatatgcccattgtagaaaatctggaaaatacaaaaaaagcacaaactagaaagcaaaaactatccataattctgtcatgcagaagcaattatagttatttccatctgtggggagaggggagcgggagcgggagagacagccagagagtccaggattccatcccccttcccatcactatcaagtctgtgttcacagcatcctgtctcaccccctcccctcccctgccgtgccttcacttggccaacgctactcacacctcaggtctctgctgagctgtccccctccctgtgccccccacccaacatgtcagttctccctgctatggcctttcccagcaccctgtacttgtcttatatgcctctttatcacaggcatgatcggattattagttgcttcttcaagctgtgtaatgtccaacaacccccctcaccccaggaaccagaatgtaattccatgacaacaaagactggacttgccttaggtcaccagaacacagcttggccatgagcaactactggagaagaaagaaggaaatagagtggggaggaaggagaggagagagaaggggaggaagggaggggcttgggattcaactctgcctttcccaagtcagtgcccattggtgggatgcagatgggaatcacacagtccctgccctgcaggggctcacagtgtgacagtgaaaaagtgaaaagccagactgtgcaagcacaggagaaggagaaaagcaaagtaccacaggggctcccaggaatggtcacctccaccctagagaagaagggtgtgcttcctggaggaggtgaccctggagccctggagaaggagacatcaggcaccccagctgaggaaatggcctaagtgaggcatggagggagaaaactcaaacaagactgtcaaatatgaagaagctgggttttgcctggaaggaacaaatgcttggaagagctgtaaatatgaagtcaactaatctggctctatacaacacttgtttcctgtgttcatcctgtgcctttctagtacattctccaaatagtcaaacaagccattcctctgagctggagtgagcaatgctgtcattcctcatgtcctaaccccttgtcctagcccagtctcctattgccagcacctgcatttctctgcctgagggctaccacccatggcaggctggaaataaacaggcaataaccaactctctgatcttccctagcagctcttaaccaattactgatgggaactgctgtataaatacctgagctccctctttcctgggtgggataactaaagcgcgtgttctaccccaggagtctgcaaactatgggcctcggactaaatccatcttgctgcctatttttgtaaataaagttttattagaacacagctcaccctttcatttacatattgtctggggctgctttctcactacaacttcatgattgagcagttacaacagagactgtaatcctgcaaagactaaaatatctactgtctggccctttacagaagcagcttgctgagttctgtgctacactgtctccccagaagtccccagcaagactaaactccagttgcccttgcttgggttaacctgcctgataatacacagtctcctgacttctttctctgcctcactttctcactcccatcctggggtttcatccatcacctttgtgaaccatatgaagcatacaaaattctattagactgcttccactaataaaatggcagtttcaggtggtttgccctaatacttgtacttgattccttgtgtcaggctctgttctgggaaaacctaaactaggagagcagggcaagtgtcatcatgcccattttacagacgagccctaatttaaagctgttccctgcacacacattgtctcctcagcaaaggcagaggtcagccttggtttgagacccttcccgcactccccagtcagagccttgccatgtgtctttgatatgtgcagtatcattaaaccacctgtaggttacctcctgcttatagctgtgaacctgttcatctaatgaggaaatcaaagttcaaagaggggaatgacttgcccagggtcagttggcaaactggcagaaatgagatctcaaacccaggtttctttatgacaaatccagggctcatcccacgacaaatcaactaccccttctgctttcacctcaggccacctattagggcctctgccctcctctctggatacacggccaacttttcatgaggatcaggcaggctcaaatatattaaaatcctttgtcagacacaaaagacttcatgtctgcaaggtgcaaagtagaaagtcaggacaggcaccctccaaagagggacttggaaagaggcccacaaagaagcatgagatacatgtatatattcatgaaaaacattaaatacagtacagaatgctggaaagaacacaagtgttggaataggcctgggtttgaagtcctgttctgcccctcactagctgtatgaccttggccaagtcagaagtccatccagatgctcaatttctccatatggccgaatgtaatgactatgcccaccttgtggagggtgacctgaaacgagggttggacactgctgagcacagagctgagcacacccactctccccactctgtagtcaggggttcccagacagtgggtgagtggaccccactggtatcctggccagatcccccatgctaagcaggtcccccatcactcagctgccatgagtatctgctggtgccggctcacagctgccccatctttggacaactgcccttagctcataggagctgccttgccccaacagttatgccctcgggggactaccctgctataggagtaccgaagcctagtcaaccctgccatgccatccattctccagagctccccaggatctggctgaagttagcctgcagccaagtgcccatgtctggctgcttcttctcctgccccatgctgcgtctccctctccctctcttgcaggtttcacctgcgagcactcccacagagcacttgcacaaaaatccacttctcaggctaagacagtggaaacaggagtgaagagttctcctgattttctgtattcgttacaaaatcaagtgacttctggggaaagtccagagaagaaggtacatgttaaattctcccttgagccgggtgtggtggctcatgcctgtaatccccgccctttgggaggctgaggtgggcagatcacctgaggtcaggagttcgagaccagcctgcccaatatggtgaaactccatctctactaaaaatataaaaattagctgggcatggtggcacgcgcctgtagtcccagccactcaggaggctgaggcaggagaattacatgaacccaggaggcagaggttacagtgacctgagatcatgccactgcactctagactgggcaacagagcaagactccatctcagaaaaaaaaaaaattatcccttgctagagccacacacctgactcccctcagggcccagctgcccagtttgggggtccctctgcgaggacttagcatgcccagtagaagctgggcacaaatggtaagtttcctgaggccagatggctcgggggtggctcggccagggcttggatgggccccggaggcacctggtccagtcttggtgttgggcccaggctgatgaaagatgctgctcaagacatttgctgaggaactaattaattttcattagaggacccaattagtgagtgcagtgagtgtggtggaatatctttccacccactctcagggtgactccaggtggcgttcactagggacactgagtgctggagataaaggcagcaaacttgaggcctcaggtgccgcagggtccatgatggctacttggggtgcctcaggggacagggagagatcctgagctgtgtatccagaaacatcattgccacagacctcctgtgaggcttcaggccaattgagattgctctctgggcctcaactaagatagccacagtagatgacctcagagggactttcaactaaaataatgacagctaacactcttaagacactttcactgtgtaccaggctctctaccaatatttattcatctaatcctcttgacaccttcgaggcaggatggggctatgataagcccgttttgcgatgaggaaacaggctcagggaggttaagtgacttgctcagagtcacacagccaataagcggcagagccaagattcaaatccaggttatctggctgtggagctcgttactttcaccatgctatactgcctagtgcaacccaacttctctggaactctcacagtgcctggcacagggatgggcaccaccataagtgcttaataagaatttaaaaacaggaaaataagaaaaaactggtagcctgaaagagtgtgatggtggcttgtgggagtgggactggatagctgagtagaagggagatgccatttctttggatgtcctctggtgctgttcggcttttttacgatgtatctacattatcagcagtaataacagcataaagcattataaaagctgataacagtgcttgtaccagggatgggacatgaggatcagaagacaggggtgcccaggacacttcccccggatatttttcatgtgtttaaaatgttgtagcatctgcatatattacctaatccaaaaaaatactttaaaaattatccaagaccaatcaagcaaagatcagctagagagaaactggcaggagggggcgctctggggatgaaaaataaccatctaggggctaccgcagagtcagggggagacaaaggaggaactggagggcctgtacaagtgtcctaccttctctgggagactctgggtatatctaaaccaagcccaccagcctctcactctgcaggcagggatactgaggcccaaagagtcaaaaagtgggtgtaggagacactgagactcggcgatgaacaaagtccttctctcttcactcctcatgcagcctttcaggctccactgtgcacacagtaaacaccacatacctagaccagagcgaggaggcctgacgccagctgtgtgctgccccatcccacccttcctccacccagatgtgcacatcacatcatttttatgaagtctacaggaaaaggaaaggcggcagcttccatagcttggatgtcttctatgtgttgtacatacatcctctggaattctcacaaggtatctctaattccattttgcaaaggacaggctgaggcctagatcagttacataccacagtcatgatgcacagctagaaagggccagagatgcaaacccaggtctttgggcctcccaagtccgctcatttttactatcccaagccacccctcacagagggtatttcccatcagtttaggacaagtcccacccggaaactatttttaagtgcctttgtcttcagattctgagttgtatggggctgggtgagaatctcatcacatcaaggttggtcccctgcctccaacctgagctagaccccaatcttccctagaaaattatcagcgacccctttcttagaaacatctgaataaactgactcagtaaactcccccgggagcatttcccagcactttgccccctttacatcgatgattcctttgatttacttcttcccagtagaggtttgtcctcaaatgaacttcctggttttaacacatagccctcccttttcccaatgcagaaaagggaccatgtcctgttctctctggacgaaaaaggagctagacctgaatcctcagaattcccagagctgtctgggtccaatatcccatgcaatggtctcatggcctgatgcattgctcattttgactcacttatcctttgtacaaatgacttcctagaggctttatgagggcctacgtgttaaacctggcacaacgcaggcagcagctgagactcatttggatcatagactctgtgacagaaacaagagggcctgaagaccatacccaggactgaatttggtacccagtgtcccagcatctaagacatcaggagccaggagatatcccacgttggcaagaccccttcagttctctccagccttttcctccaacccagtggttctcaaggtagggtccctggatcagtaccatccgaatctgcatcacgtgggaacttgttagcaatgaaatcctcaagtccctcctgcccccaaactaaataaaagactctgggtgggcccagcagtctgcattaagaagccctccagaggattctgaggctcactcaagtttggcggccctgctctaacccatttaaactgacaacagccactgtgacaactgcagctgctaccaatgactgggaacctactatgtgccgagggttaaacatgcactctcatccattaatcctcatagcaaaggacaccttattccatacgtccagctctgggttaggtgtgttgtgtgcatgatgtcatttactccttactataaccctcttgagtatttactattattatgccccattttacagatgcggacattgaaccccagagggttgaagcaacttgcctacagtcatacaatttagaagtggcagtcaagatgaaaattcagatctgccggattccaaagctatgttctttctgtccgtccatggaagttccccagggtctctcacacctacatcatcagtctgggtcaggtgagattcgaagaggggtggaggcaggcagggtgagcagaaagaacccagcctggactccacagtgccttccagctacagcgtgaaaggaagctgcgttatgcatgtaaaggcacagccatctgcgcctaaggaacataaaaaacagggattcagggggcatgagttcttggcctctctctaacttcacccagctgggggccttttcttttccttcttcggacctcagttcccgcaccagataatctttatcctctacaaggctgagataatttgcccccttctctgatcttgtctctctaaccacactggtctgtcatctctagccacactggtctgctttctattccctaaaactcaaactcgcactgacctcagggcctttgcacagttattccctctgcctggaacactcttcctcctcatattcccattgctggctctttgtcagttaggctttatctcagatatcacctccttagccttccctgactaccttacttaacattatctcctagcccatcatcgttccattttcattccacttagcagaacctgaaattctttattgaattggttacctatttattgtctgtttcccccaccccagaatataactccctgagagcagaaaccatgtctgacttgttccttgatatatccctagcaccctagcacctagaacattaacactgagcagctcattaactactaactgaatgaacaaataccagaaaagaaaacctggactcagaggtcagagctctggatccttaatatgtgaccttggcaagccacttcgcctctttgagcctgtttccctacttgcttaatgaggaaatgggctagatgctctccaagggtccttccaagacttccagtcttggaaagccagacctggaagcagcccagctggtccatccagagaaggcagctggccagggtcctggcagcagctgccctctcgccacccccatccacatccctgcccagccacacagtcatctcactcccccgttgcagaaactgttaatgaagtgcgcactgctaaatgcagttacaattacgggggctaagaataaggcgctgacatcagcctcctcagtttccgagtgaatcagaaggggaggggggaggaaggaaaaaaggggaggggggatggcgctctggagctgtcaagtggaaatagcacagcgttaaatataatccagcactggcctacatcagtctggagaggcaggtgatggcttggcccccagggccagggcagacaactggattcttcaaggaggccaggcagccacggcagctgagggccaactgtgatagggatcaaccaggaaccagtggcagggaaggcactccaatgggtgggtggattgtagcagggtggtggaccctggtgggacacatcacacccaggcctttgtcacctgctgttctgacagcacaagcacagccccaggagcttacatagtcctgtcccacccaggatctcatttcatgcccagaagcagaagatggcctagagtcaaacacacctgggtttgaatcaccaccctataacctgagaaagtcatgaattcaactgctctaagctgcctggctttcctcatctgcaaaatgggtacatctgcaacagcagctaccccttcaggttgccatagaattcagtgcgatcacagaaagcaatgagcatggccaagcaagcccatcaatcattttatttttataatcctgagagatgcttgaacaaaaataattaaccctttttttccagatgaggctcaggaaggttaagagacttgcttgaggtcagagccagagcggattcaaatccaagcccaggtatctttccaatacaaaaaggcagtggaactgacgaggaatgcagaatgggagaaggtttatagtgggggagatacttcacccttttgagcacattcaccaaaagtggcacctttccagcaatttttaaaagacatgatgaaatgatggttgctacggccataaagaaaagacacagaggaggcaaagtagaaaaaagtccctcagacagacaagagggtcggctgagggtgaaggcttccttccattctcgctctcctccgcatctctcccttcacccccactcagccttcagttggaacttgctctgcctctggttctagcagggagtggggagggatgcagagccacatcctgaaagggaaacaaggtagatggacctctctcccccttcccaccaaacagaactaggtgggcctatggcagctgcaaaccgaggaagctggagccaggagtctaggggattggggatggggaagggggtgcctaagggagacagaaaataaggaaagagcactgattgcaccacagcagacctgcagaccagtgatctgtacaatggggtaaggcgtgaatcctcatgcacctgattttctaagatcattctttcaggataatttgattaaaataaagtggtctgggctgggcatggtggcgcatgcctgtaatcttagcactttgggagtccaagacgggaggatcgttgagttcaggagtttgagaccagtctgggtgacatagtgaaaccccatctctacaaaaagaaaaaaaaaagaaaattagccaggggtggtggtgcatgcctgtagtcccagccacttgggaggctgaagtgagaggatcacttgagcccgggaggtagagatggcagcgagctgagatcgcaccactgcaccccaccttgggcgacagagggagaccctgcctcaaagtaaataaataaataaataaataaagtggtttgcgtccacactctcaccccacccctctacttgaactatgggaacaactggttcaattctccatcatgcttcacttatccaaatctacaagagttctgcccagctctgaaaacattaagaaaatgggaaggggggtgtggtcaggaagaagtgagagaggaagtgtcctgccctggagggtgagggtgggagtggaggcttcaaagccgcaacttcatgcctccacgtggtcctgaccatgaaggatattttaaggcctcctccctcatccaccctgccagcctccttctagggctgaaggattcattcccaccatcttagagggaaggggtgagacagcaggacattttgtttcccagaaaaagctcaggtcaaatttcaaggacaaaagttagcacttggtctgggaaagaaaactctgccaaatggaataaagggggagggggagaactccagtgaggtcattccaggtgcctgggggtgtggagagaaatcggaactctgattctccctgccaggatctgtccggcaggatatgggtatcgccgcctcatcacccagaagtactcagaccaccccctacatttcccctctgtccaaaaatggggagcggggcgctgtggtactagtttttggatcccatccactatcccaccccgcccccagcccaacagatttggtctgagcggaagagggtggtgccaggaagggctttccagcccagagatgtggcccaaaccgctaggagagggactggtagctggctggtgttgccatggcaacctcctccctgcgctggatcgaagcttccatcctatgggcaaatcagagctggctgctccagcttctccgcccttctcccaggcgggagggggagaactggacgctgaaaccacttggtcaggctcaagaacaccaggctcaattccagaccctgatgtaacaaccccctttggcatctgttggaaacttgagacaccccagctccccagctaggccccaaggcagagtgtcagggctgggactgtagatgtgattggtgcaaatgaagtggtcaggaagagcagggaaccagtggctgaaatcctccccaccctcttgactggcaggcgagtctcccaaatccctatgtttaagccacttcaaagaaggagggcccagctctaccttaataactgtaatgatgcaataagattagcctattaaaattataaagctagcattttgagaatcagccttctcccctccccaaacccacagattcttttctacagtcatgttcagaaacaactctttctcagtaataagatagataacagctaacatgtagtgagagcctacctcatgccaggtactgtactaagacttctgcacagcacaaacagcataatggttgattaaaagcatagatgcttaagtcagattgcccaagttcaaggcttcattccctcacttcctggctgagtgaccttggatgaattaatatgtctgtgcctcagttttctcatctgaaaatggggatgttaacaggatagcagttttataggcttgctatgaggaatgagttaatatttttaaaatgcctgggaatatgtctcgcacaaaggtaatcatttgtaaaatgttaaccctatgcagtccatgttattatttttcttcttccttacagatacgaaaccgaggccacgtgtctaactcctccccgattacaaacccagtgccaacaaggctgggcaacaaaacacacacacaaaaaaacgcctccaagcacatgtttccctaaagccccagcatccttgtgaaagagggcaaaaggagcatctcaagaagtaagttcaaagtgcacgagggaagatgccccttgagaggaattctgggaaccagtaatgaccagcatcctgggcccacggcgggctagaaagaggtgtgaagaaggctcagcttcctgtgcccaccccaatggccaaggatcccaagtccaaatcaggaatgtgctctgccccagttaaggctaatgagaaaaaggctccttctcacaccatttctcaggaaactagcaaaaggatggcaactaaactctgaagatggctctggctcagtctagttggaaaaagatgcatttcaacatgagttggaagcagcaacaaaggggaggctcctagatgagccggaggcctgtcagggacacacttctgagacggagccagcagagacagacaggtattaagaaggccaggggagggaggggagaagaggcaggtagagccacgcctgtgtccagtatgggagagaccattccattgcttttagaaatcagttcagtgcagtgctgttctaaaagaataaatccaaaaaggcttcttttaggagaaaattaatgactttaaggagaacaggagaaattaagcaccaagacaacgctgcctacttctgactttcaccagacattcattatttttccggaaatgaaagttgactttctccctccccctcccaaatttgaagcatccctcaagaacagacagtgagcacaagatgcccaaaccaaactcttggtcgccagccgcacccccaggcctcctcacctgggaaacattttctacacagtaaggtctggatttcttaaaaatcctctttcagagggagggctactggtttaatggaaagagaaccataaacctgattttagtctcagctctgtggctgcctcactagatgaccttggcatatatatgtgtgtgtgtatatatatatatatacacacacacccattccagggcttcagtcacacacacacaaacactcacacaaatacacacacacccccatccatttgcgggcaaaaaggggatagacaagatgatttctaggtctcttccaagtgaaatactaaagaatttcaagaaggctgctggaaaaaacaaacatgagtggacctttaaaaatatcattaatactacttgaagttatctgttctgacttaagtgaaaccagagcaagttgcctgcagcctgcaataaccaaggtgtttgacccatgacacacagcatgactttgaagaaaaactaaaccgctcctgcctctgatgctcctacaaacccatgctcctgcccagcctggctcttgagatccaagtggactgctgaccactctactgtgttggggagccccctacttcttcccaccttgccttgtccagaataataatacaacctccctcagctacatgaaggcagaagttaaacctctgagcctcagttgtttttttctgtaaaatggtgattataaaaatggtaaaatgtctctgcagtaatcatctttacccttacccccatccccacctccaggtcaatagaaagacaggtctattggggatctgcctcacctatccccattcattcaccagtcaacaaattcttctggagaaagggcaggaagacatgcccaccacttcatcccatgatggaaccttggtggccaggttgatcagacaagggtccccaaagactaagtctaaacctgggcccaggaacttcctaaaaccgtaggctacattttgtggatggtgcatatatgcacttcgggagagatagtccatgttttcctcagagacttgaaagtgcccatgaaaccattttgctcctcaagcacatacactcctccagcacatacactcctctgttttgttcccccattgaattcaaagactctcggattttcaccttataaaacactgaactccaccctcacaccatacagagctttgcatcgatacgatgatccccatttcagagatgaggaaatccaggctcagaggtggcatgacttgcccaaggtcacagctaagaagtagagaatgaagactggaacctgattccgattcccaatctggcattctttggggaactctcacccaagccctctagctaccccacctgttggtggattcccttcctcaccccagaaccaaatccggagctctcatgttccttctgccgggtcccagggccctaaagagtaggtttccctacagctccccacccctcgctctggctgaggttgtgcgcaggcctgggaggaggaggttcaagccgctggctggtggccggcttcagcccaccaagaaaggcgactccagggacaagagcacctgaggtcaggggcacacaccagcgggcggacaagtgtagagttggcgccgccctacacctctctccgggaagagaggggaggaaaggccgtcacctggccggttcccctccgtctgccccaggcgtataagaagcaggagtctggagccccagcccatgagggaaggagaggagagataaatgggggcgctcaaggcctggggcgccgggcaggggtcttgggcagggatcctctggatgtggccaagacaaagatggagaggtaaggtctgcgcgccacctccaatggcggggggcgcgtcggagccccaggggtgggacggccaaagcccagggcttgaagagtgggcacattcaggagactcagggagggtggcaggtcggctccagggacgaggcaaggggcctccaataggcgcgggtgaggagggagatgggtcctggcgacccaaagggcccacctgcgggaaaggtgaatgcagacaatctcggggtccctgggggagaaggccagaaggtagcgcatcctggagaccctggggtcccgtgggtgcggaaggagaccctgggggcgccttcccaggggattgggggtggggaggagggcgcacgggtcggggagggggctaccggacctggatcccgggacaccccgggggtctggggggcgggccgcgcgcttacctgcgtcctcgtcgtcgaaggagttcatgcacgggaagtagatggcgagcgcctcgaaggaggcggacagactgaggcggctctgcgagcgctccatgcccgcgccggcgccgggcgcctcggccgcggcggcggcggcggcggcgggcggcttgggcagcttggccgccccattcttgacgcggagtacggcgcgcggcgtggtggcggcggcccggggccgggccgaggctccgctgcggggctggcgggcgcggcggggccggcgggcgggccaggagctggcggcgcgcggagcccgaggcgcgctgtgctgctggcggcggcggcggcggcggcggtggcggcggcggtggcggcgcagcgcgctctggtccgcggcgccccccgccggcagcgcgaggcgggcttggagcggcgccgcagccaatccgtgccgccgggggagggggcgccgctgcggggcgtgggagcccggagggcgcgggctgcggcctcttctagcagcccccgggcccggcaggtgcgcgcggggaggcaggcgccgggcgaggttgtctgggccctggtccgagggctgttcccgaccccgcctcggcccccaccctcagccggccgacttgcggagaggccggcgtccagtccctcacccagacaggcctctcccagagacactggcgcgctcggaggggatgcgctcaaagggtcccgcccaggcgggtcggcactcggcctcccacacagagaccctcggcttcacacctgcacccacagagaagctcaaacaggcacccacacctacacattcactctgcaacatgccccgcagacacccggacagatacacccacagacccaccccctcacagatgcggggacagacacgtccacggacacacgcagactcacgcagagacctgcaaacacactcagggaggtaggcaggacatccctggtgcccggcctccctcacggggagactctcagatgccacaaaaccccacgaagttcaggtaggcatacacagtctcatgcattcacacttaccaaagacaccccagaattcatacacacattcatacactcagatgaacacacaagcccagacccagcacacactctgtgtcgcctccccctgtgatcatctcagcactgtcaaacactctgactgacacggccagatgcacacaccttcaccctcagacacactagagtagcacacacacgccaagacacagccacacagactccatccctcccagtgtgggtgcatcccgacggattgactgacaccctcagactcaggtacactgagacacacttggcaggctcacactcacagactctcccattatcaccctcggcgacccgcagtcctcagacacacacgggctcagacactcacagccccaggacagagacgagcgaatcggaaacccgtgttccattccctgcatgtgacctgggacgtgagggtccctgcccacctaatcaggccccagatgtcaaacaaccttctcagctgctcgcacacctctttatgaagccatctggcgacatggaaacagttcaggcctcagaaagagacagcccagagtttgaatctcagctgtggtgctgtctttctgggtggcctatggcaaaactctttatcccatgggtcctgttcctcatctgtacaatggggacaggagccttccattttggatggttgtgaactgcctgtaagataacacaggtgtttgttttctattgctgcataacaaatgaagcagcttaaaaacaccaatctagtgatttacaatcctgtaggtcagaagtctgggcagcctgagctgggttctctgcttagggcctcacaaagtattggccagactgggctcttctctgcaggctctggagaagaatccgcttccaagatcattcaggttgttggcaggattcagttccttgtggttgcaggactgaggttcctgtttccttgctggctgtcagccagaagtcaacctcagctcctagaagtggctttctggtcctttcacctggccccttccaccttcaaggccagtttcaggatgtcaagcccttctcatccttcagtagaatctttctaccttggcttctgcttactggcctgagagattctgcttttaaaggtctcgtgtgattagatcaggtccactcgcatgatgtccctttgacatataatgtaatataatcacggtagcgattcctgatcagggtcgcagtttccacccatgctcacacaagggcgggatcacacaaggtattacataagggcaaggatcactggagttattctgacacatctgcccatcacagtgtgcaaaacacctagcacagtgctggccttcggcaggtgctcctgagccctagccccttcccagggaccagatctagactttgaggcagcctggtgtcatggttaagagtgctggtataatcatccccatcttggtcaatggcagctccatttttccacttgtttggatcagaaatgttggatacttgactccagtctcacacacaccacattcaatccatcagcaactcctgtcatttctatacacaaaatgtaaccagaaactgaccacttctctgccccaaaccctcccatctcacagtcaaagtccatgttctacaaggtcctaacttctttggctctgccacccctctgtcttcatacccaggacaccccggtggctcactcggcttcagaacatctgtactgctgttccctctgcctgaagccctctcccttgcaaagggctgtgtagctcactcacagatctctgctcaaatgtcactttccctctgaagtcttccctcaccactctttatgaagtagcaaaaacccctccctgaaatgccagatcctctctaccctgctttatttttctctgtagccctcatcaccatctgacatgtttcatatatatgtgggggggtacatgtatatatacagatacacacatatttatgtacatgtgtatatgcgtgtatgtatgtgcaaacacacatacatgtgtatatgcatgtatatgtgtatgtgtttgcatatatatatatatatacacacacatacacaacacacacatttttattcttgtttatttgtttatcgtctctttttccccttcccagagcccagaaagatgcctggcaaaaagttcgtgttctgtaaatagttgttgattgaatgaataaattctcacaccagccataggaaggagataggtatcctttgcatcctctccccatcttacagataaagaactgaggcttacgaaggggaatggacttactcaaggtcatagtgagtaggcctcttgtcaaaaatggtgggtgggggccaggtgcagtagctcatgccagtaatcctagcactttgggagggcaaggcgggtggatcacctgaggtcaggagttcgagaccaacctggccaacatgccgaaacctcatctctactaaaaatacaaaaattagccgggcgtggtagcaggaacctgtaatcccagctacttgggaggctgaggcaggagaattgcttgaacccaggaggtggaggttgcagtgagccgagatctcgccactgcactccagcctgggcaacagagcaaaaactccatctcaaaaaaaaaaaaaaaaaaaagtgggtggggaatctaacccaacataaggagatcgaagaaggcttccctgaggatgtgatgttggagctgaaaatagcacctcctatgtgcctggacttcttggtgtgatttctcctttcttggttagctcatgcctaaaattccatccatagggtttgggcctgtacacttaaatcatttaccctttgtaaatatgtaatgtttccccatgggaaatttaagtggtcagccacttacacctgggtatgaataatgcattctaagaacaagtttggggggtggagagggatgcttaagaaaatgaatgagggaagtggtggatgtggatccagagaaggaagggatgggaagtcagaaatgaacttccaggttggagttcacagtccagtgagatggaggatgccaagaaccaggcagctcagtggagtggagcggaagaagcattgcctgacttgggtttaaacgcctgtccttattttatttatgtgaccttgggtatgttccctcaaggttctcatcaaaaaatgagagtaatgggctgggcgcggaggctcacgcctgtaattccaatactttgggaggctgaggcaggaggattacttgaggtcaggaattcgagaccagcctggccaacgtggcaaaaccctgtctctactaaaaattaaaaaaattacccgggcatggtggcgcacgcctgtaaccccagctacctggaaagctgaggcacaagaattgcttgaatctgggaggtagaggttgcagtgagcagagagcacaccactgcattttagcctgggtgacggagcgagactctgtctccaaaaaaaaaaaaaaaaaaaaaaaaagggagagaataattaacacctctttgcacaattgtgatgaagattggagattggacatatacagagtgcatcgcatgtaataagtacttgatagataaatttattgcatgtaaattccaagtgctcactattgtacccagctctacaaatacagggatgaataaaacagacctggtctctgccttcatggagtttatagtttggtaacattaaacaaataattatgctaataattatttaaattatttaattactaccttatctaatagttgcataataataattttaattgcaattgtgataagtgccataaaagatatatatctatatactgtgtgtgtgtgtgtgtgtgtgtgtgtgtgtttgagtgagatagggcgagatggggtcttgctatgttgcccaggctggtcttaaactcctagcctcaagcagtcctcccgccttgacctcccgaagtgggtaggattacaggcgtgcacccccatgcccagcccagcatgcatatacgttgcagtgcatttgtgtacatgtatgtgcagcttcaagtgggtggagagtctgacccagcatgaggagagggaagaaagcttccctgaggatgtcatgttcaaaatggcacttcctatgtgcctggactcttcttggtcctgttcttggtcaaacttgttcttagaacacattttacttatttatatcggtaactaaaccaaatcactgccctcagatttgcatttgaaaataactctggggccaggcgcagtggctcatgcctgtaatcccaacactttgagaggccaaggcgggtgggtcacctgaggtcaggagtttgagaccagcttggccaacatggagaaaccctgtctatacgaaaattacaaaaattagctgggcatggtggcaggtgcctgtaatcccagctcctcgggggagctgaggcaggagaagcacttgaacccgggaggcggaagttgcagtgagccgagattgcgccactgcactccagcctgagggatacagcaagactctatctccaaaaaaataaaataaaataactccggggctgctctgagagggatggatttgagtgaattcagagagtgccttgccccttctcttcaggtaagtcctgatttgaaccaaaaatccattgcttgtttttttgcctcctagcaaaggaagatggctgagaaaggatgtcccggtggaaaggtgaagtggaggagtctgagtgacaaagggtcctatggccggataggaggccatggctgggggaggctgagacatggatgggaggtaacaaggcctcggctaaggagagggctgggcctgaaagttccagagatcacttgagcaggacttggtgacagactggatggggtgagggttgggaaggaaaaggaggaacaaagacactgccaagctctgagcatcaagagaaacagcacatacagatggagccctcctcttcagacacctttccctaagctgaagccttcaagggagtgccccttaaattttacatattttgcaagacccagctgagtggctttcagctagagaagtgacaagtggctggaatgtagttagttaaacctctagggggtcctatttgcagttttgtccaagagagaaagaccgatcttgtctgtgttctgcctgctctgtgtgtgtgtatgtatgtgtgtgtgtgcatgtgtgtgtgtaaaactcccctgctaatgtgcatgcctctgatagataagcatttctgcatatctgtgtcattgtctttgaggcaataaccttgtttctgaatgcatcctttcaaggtgcatgtcctcgtgttaaatgtgtccactctagctttgaatgtgatatgtatcctggtctttgcatgtactgatatgtgggtatgtatgtgggtgaaagacataaacagacacacacaaagacagagaaagacagtgcctgtctctgtgtgcacatgatccatgtattcccgtttccatgtggttctgtgatgtgtttgtgtcttctgttgatggtgtgtccttctgtgtgtttgccttatctctaagtgtattggtgtctatgtgtaactgagttgagttagccgtattcgagtgtcggtgtaaggtttctgtaatgcctacgcttgtgtgtgtctctttgcatcctggtcagtgtgaatgcatccctgacagtgtgtgaatgttgctttgtgtgaacttgtccatgttgactggtagcttgagaggggactcatattttcttggattaatctcagtctttaagtggctaacacatgccttagagctaatagggatagagatattaaaatctgttataaactccaaatcccctaactacttacctaaccattaatttattctttcatctacccatccatccatccatccatctctccctccctccctccctttctccctccctccctcttgatttcactggcatttagtaactatgtagttatttctcttaggcgtgagttttctcatctataaaatggagatgataatgtagctacctgatagggctggggatatggggtagaaatggaagtgggataccacatataaaatacttaacgtgttgcctaacacatagtaggtgctcactatattaacgattattgtcacatcattgtggtcactgtgattcagcaaattctcatcagcactttactaagggccacccctgagctagaagctggtgaggccctatccatagcagaggccattaagtgcctctgcctcaccttcttgtgtgacctgggacaaagcctatgccctgtctgaacccatagagtgggtagagcactcttgccccaccttcttacagagattctgggggcatctgcacttctgaacctgcaaggagctgtgcagttatgtagcaggtcaggggacattccaaagccttaaaatggcagaggcctgtcctgggtcatcaagagggtcaggcagagctgagacaaagccagaccccctggcacttcaggccaaagccagacccactggcactgacaggccaaagccagacccccggcactgacaggctttcctgtcatttctagtccttgttctctctctggggacgcacctatcgggaagccatggagcagagcttcttcacttctccaccatttgtctctcacttactatttagtgaggggcctggccttatttttaaaagaaaaagaaaaaagagaactaggtagggggtgtgatgtccacctcaataagccactactgtggacaagagacagacagagacagagaaagaaggagagaaagggtagaaagagacagaaactaagaaagagacatggaacactaacagagagacacaaagagacagggaatggaagagtcagaggcagaaacaggagagagggagggagatggttggagacaggaagagatcagaatgaagtcgggctttcttgcagacctgatttgggctgccccaatttacaaagctgtaagagccctgtagcaaggactgccactctcctcaggccaccttcatccaacacacacatgtactcatacacactcatacacacattcacacactcctaaacacactcatcctccaatgctcatatatgcatgctcacaaaatggaggaagaggcaggggcctcaaagtaggggtggattctggtcatcaagaaccccctgtgtgaccttatgcaatgccaagccacatcccatttgagtctcagtttcctcattcggaaaataagcccgcagacctcactcagtggtttcaaagctaaaggggataatggatgtaaaaaagttttagaaataatggaaaagtctggaaaaggacctttggaactaggcaagctaattatacagctcacatggaaaattgctgggaaaatgtgcagttgaggaaagtggggaaggataatgagtgatcaggagccctatcaaatcccaaaacattctaaaactacagtaagtttttttgtttggttggttttttttgttgttttgttttttttattttttagacggtgtcttgctctaatgccagctggagtgcagtgacgcgatcttggctcactgcaactgctgcctccctggttcaagtggttctgctgcctcagcctcctgagtagctgggactacaggtgcatgccaccacacccagcaaatttttgtatttttagtagagacggggtttcaccatgttggccaggatggtctcgatctcttgacctcatgatccgccagccttggcctcccaaggtgctgggattacaggcatgagccaccatgcctggcccagtaagttcttttaaaggccaaaaaaagttggattcccttcatatataaagagcacttacaaaacagtacaaaaaaggccatcactcctgtaggaaatggagaaaggctcttaacaggcaattcacaggaaaaaaaatacaaatgacatctaaaagcaaaaagttattcagtatttctcactattaacagaatgtcaattaaaacaaattatttacccatcagtctaacaaagaaattgcttgaaaataaactgtatggggaagggagtggagaaatagacacagtcacacattgttagtgggagtatatattaactgatgaaaattttggagattaatttgttagtatctatcaaaatatttaaattcacaaaccataacttaacaattcaccgtttgaacagagcaattccacttctaggaatttattctacattttacatatatacttgcacatatgcaggaagataatgtataaagaatgttttgtagcattgtttataatagcaagggattgaaaataagccaggtactcatcaaataaactatgatacatccatatagggaaattctatagtcattaaaatgaacgaggtagatgggtttgggacagatagcctagatatataatgaaataagaaagcgatgtctgaacagtatgtatagtgcactcccatctgtgtccaaaatacatatgtatgtaggtatttaaatataaatctttgaatgggcacacagatttcaggagccatacacaggaagctattaatgatgatttccttaggtacataagactgataacttctaggtagtagtcagtgtcttttgctttatgcccttctctagcatatgaattttttttttttaccatgagcatgtattgtttggaataagataattttaagtacattttttcacctaaaaaaggagttagtatccatagttagtaaataattacagtgtaaatgtgttacttgggccaggattacctacaagcttcctgttatatatgacttcagtaacatggattaggtccagaatcccccttgggaccaccctcagggtgggagcacgctttgccgccagtctcctgggaatgagaaagtaggctaggctgcccaaaataaccacctgccatttcccaagctggtcactttctctcctgagccaagggaggctctggttgggtggaaaaggtggatttgtctttccaggaaccacaacctttttctatcgcactcctcctccccctgaccaagcaaccctgacatctaaacctgtcctttgatgccacccagcccggaaggagatggctggagtctagaaacctagtgcaagattaaaatctgctctgccacaggtttatactgtgatcttggggaagccactctctccctctgggcctcagcttccccacatgtcagaagggggatgggataggatgattgctgaaagccctcccaactctgacccatttaacttaagttagatagtcatgagttcaaatctgacctctgaaagtcactagctgtgtaccattgggcaaaccacttcacctctctgagctttaatttggtcatctataaaacagagaaaataatatacttcatagagtaattgggagataaagtatataaagcattaaaattgtacatagcacatagtaacatctcaacaaatggcagccatcatcatcatccagagtcttacttggacctggcccctcagaagtagccctagtttaaggacctttcccactcatctcccaacctgtacccaacagctcttctgccctgggagggccatgtgctctgacctaggaatcaataagcataaaaccttatccttgctactgaattcatatggaatcacgcgggtgcagtggctcacgcctataatcccagcactttgagaggccaaggcaggtggatcacatgaggccaggagttcaggagcagcctggccaacatggtgaaaccctgtctctactaaaaatacaaaaattagctgggtgtggtgtcacatgcctgtaattccagccatatgggcggctgagacacgagaatcacttgaacctgggaggcgaaggttgcagtgagccgagatcgtggcactgcactccagcctgggtgacagagcaagactgtctctaaattaattaattaattaattaaatgaattcatatggaatcataggttaatgtgtggccccatccaaatcacccatgaatattataattgattaataaagactaaacctctgggatggtcaggaaaggctaatgggtgggaaggattttgggacaggggcctcttggaattcaactgggcttcatttgcaatatcttttccaggaggggtacattccctccaggtactgtgacaagcctttaagattcagggaaggtgtgcataaagagagcttttgatgctgcataaattatgttactgcgatcacctccacatggaattgtccccagtagaaaaagctggatgttcctccacgtttctctgtctccactcccacagacccatcccaacttaataccaagggagtgggctcaatctccttgctgtgccaggtacctatctttaatgctggctttagtgtcaacttaggcctcagattccccagctttacaaaagaggcaggttttttcgttttgttttttgttgttgttgtttttgacagtcttgctctgttgcccaggctggcgtgcagtggcacaatctcggctcactgcaacatctgcctcctgggctcaagcgatcctcctgcttcagccacccaagtagctgggactacaggtgtgagtcactacacccagctaatttttgtatttttagtagagacaggatggggtttcgccaagttggccaggctggtcttgaacccctgacctcgaattatccacctgcctcagcctcccaaagtgctaggattacaggcatgagccaccactcctggcctacaaatttctttttttaattagccaggcatagaggcacacatctgttaaatgctttttgtcaccaaaagcctcctaatgactagacccacctgctcacctgactatcttctggcccatgacctctttgacattctcctgcattccttcaataaaaccccctcctcgttttgtttcttgaaaccaaataaccccacacccagccagagcttttccaagcaacccctgcgtatagattttcatggcaggcatctttgattctgatttggagaagaaagtagcaggcattaggaagaaatgtagggcaggctgtggatcgtggacgaaacacatagggcagaaaggtgaggtagtggtggcatctctccagccttgtgcctctaaatcaggctgacacacaccatggagcccatggatagtattttttttttttttttttgagacagagtctcattctgtcacccaggctggagtgcagtggcacaatcttggctcactgcagcctccacctcccaggttcaagtgattgtcctgcctcagcctcacaagtagctgggattacaggcacctgccatcacacccagctaatttttgtatttttaatagaggtggggtttcactatgttggccaggctggtcttgaactccaggcctcatgtgatccacccacctcgagctcccacagtgctgggattacaggtgtgagtcactgcgcctggccaatagtaatagttagtgagcatctctgagccaggcatggttcttgagccaggcatggttctaggcccaggaactcagaaaatacccagacagacagaaatgtctgccctcatgaagcatccttacctagtaaggataaacagacaatccatttatgcctagtgttccattattggaatgctaagcttgtgggagttatttatatcctactgctcaaggtcatcaccaagatctgatttttcacacacacaaaaaattgcaacctccggcataaatgggttaagaagagaaacaagtagaaattacagtgttttagatgtaagcgctgttgggaaaagtatataaagtagaggaaaattgggaggtgtctataatgctgtgcaggatggccaagaaaggcgtcatgagatggtgacagtcaagtaaagacctgaatgggggaggattcctgcagatgtctggagaaagagtattacaggcaaagggaacaacacgttcaaaggccctgaggtgtgggagtgcccctcatatgtcagagaattggaaagcaggccagggcagtgagtgtagatgactgaagggcaggtgggaatacaagaagttagagagtaatgatggaaaggagtggaaaaatgatatagtccttcttgatttgtgcaatattcttttttttttttttttcttttttggagacagggtctcactctgtcacccaggctagagtgcagtggcgtgatcttggctcactgcagccttgacatcctgggcccaagttatcctcctcatccttgtgagtagctgggactacaggcacataccgccatgcccagctaattttttaattttttgtagagatggggtttcgccatgttgcccaggctagtctccaactcctgggcacaagcaacctgcctgcctcagcctcgtaaagtgctgggattataggcttaagccaccatgcctggccatcaatttgtgcaatattcatatgccataaatattattattttgttactgttccttaaattggtttgctttttgttcggatacatttgaaatgaaaattttatatcactactataaatgaaggacaagtatcacttgcaacaaatagaatgtaaccaaataaataaatacaacactgaaacaattattaaattatagaaagatgcggtggcctgtaggaggcttaagtctgattgacagtcttagagaagtgacaaggcatactagcacccgggtcctacttcatgtgccaaggggcaaaaaacatactagcaccaaattgggagtttctctggtatggtatttagtgttacactatagaaaatcatctcacgtcccactaggcaggatgaccaaattgttgtggtttccccaggactgaggggtttcctgggatgtacttttactgctgtaactgggtcagtcctggaaaaaccaggatggctgttcctcctatcaccagcagtccctctcccaccctgtagtctaagaccatctgccttcagcttgcccttctctacgttgccctttgtggtggctgactctaaggtgatccttacctcctggagttggtgtacctgggtcattccctccccttgaatgtaggtaggacctgaaacttgcttcttacccataaaatatggcaaaagtgatgggatgtcacttccatgattagattccacataagatggtgacttccacattgctaactcctctctttattgccttctcaccttggcaactctctattgccttcctagcttgcatgatttggtgaagcaagtagctgttctgcggggcaccaatggcaacctctggtgagcagccagctaggaagtaagacccttagttcaaaggcctctaaggaaccaactgttgccaacaactgtgtgagcttggaagcagatgcttccctcatcgagccttcagattgagacccaagccctgactgatgcattgattgcagcctcgtgagagatccgaaagtagagtgcccagctaagtctgcccatagttctgatccacagaaactgtgagataataaacgtgtgtgtgtgttttaagccatttaagtctatggccatttgatactcaggattactaatactaaaacaccctttccaaactattgcttctctgggtatattagtccgttttcatgctactgataacgacataccagagactgggtaatttatttattattaatatatatattttttgagatggagcctcactgtgtcgcaggctggagtgcagtggtggcacaatattggctcactgcaacctccacctcccagattcaagctattctcctgcctcagtctcctgagtagctgggattacaggttcgcaccactacacccagctaatttttgcatttttagtagagacagggtttcgtcatactggccaggctggactcgaactcctggcctcaagtaatctgcctgcctcagcctcccaaagtactggcattacaggcatgagccactgcacccagcctggactgggtaatttatgaagaaaaggaggtttaatggactcacagttccacgtggctggggaggcctcataattgtggcataaggtgaaaggcatgtcttacatggtggcaggcaagagagaatatgagagccaagcaaaaaaggaaatctcttattaaaccatcagatcttgtgagacttattcactaccatgagaacagcatgggggaaactgcccccatgatttaattatctctcactgggtccctcccacaacatatgggaattatgggagctacaattcaagatgagatttgggtggggacacagcaaaaccatatcactaagtcctgattatttgcacggctcatttatggaccctgatgtcttgaggctattgctcagcttcctacacctgaccctcaaggaaccctcccctatttcattctggctgcccccagctgaggtggacagtagctcaggtttcccttggtagacagagctcagtatccctacgtgaggggatcttcactccaagcccaacaaacaggagaatgatgggaaattaaggcctggagatgttggagtccaggccactgggcaagctgcctaaaggaagtagggctctagcctctggtctggggacagggacaggactctccacttttaactgctccctcctggccatgccccaaactgcagagcccgtataagtcaccattacaggccatctgttctctaggccttgcttctcactctccctgtttccaaccttcttgcccaccctgttggttttgtgcctggttctcttttcttagcctagttccatccatttgaaaaatcatctggacagctgcccagatgcccaatttgcaaatcaaaataaactaattttattacaaaaataatttttgcacattttaggaaagttagggaaaaaattaaaataatcacaaagaaaaaaattgaaaatcacataatcataccacccagaaataaccacttttaaacctgatgtatttttttgaccatatatgatatacgaatatttctaatggtattatactataagtgcttttatggcctgtgttttgtttatttttccacttagctttctatcataaacatcttctcacagcaataaaaatacctccatctcatcgttttaagtttctgaacaacagctgacataatttaactaatttctaatgttggacatttaaattgttaccagttttttgctgtcatgttaaagtttaaagaaatacttttgcaattagattgctgaacacatccatgacttcactagcaggacaactgctgggtcaaaatgttgcatggtttgaaggcttttaataagttttggcaaatttcctctaatgacattgtaccaatcttcactctccaggagcatatgacattcactctccaggagcatatgacattatttcccatcctcattctctaaaactagcaattttctttgtgattctgtttttcatggtctgccatcagcaataccataatttctttctttttttttttttggaaatggagttttgctcttgttgcccaggctggagtgcaatggcgtgatctcatcgcaaactccgcctcctgggttcaagtgattcttctacttcgatcaagactgtttttgagatttgcgttaaattatataactctattcattttaactactgttaaattttatcttcatttttaaaatttgttttcagactaatgtaacttgttgctatccttgtgctattataaacaatgagttaatgaacatcttcatccctgtatctttactagggtttctatgcagaagtggtttgctggttggtaggttaacattgtttttcaaactttttttattgtgacctatgataataagcacattttacatcacaatctccacatacacaagttaaaacaaaagtttcatgaaatagcccttatctttattactagaaatgtattctgattcaacttcctttttaaaatgtcaattacaactcacaaattgattttacaacatagtaatgggtcatggcccacaatttgaaaaatgatggattaaaatatatttggtttcactaaatgctttaaaattactctttagggtagatacactaatttacaagacaggttatcattgccctacaccctaaccaacacctgattttatatttttttctttttgccagtctgatgtgtataaagcagcatgtcattgttattttaatttttctttctttgatgctaataagttgagcttctctttatatgtttattcactaattgagtttctcagagagtgagtttgcctattttttgtattgggttgccaggtttcttcttgctgatttactgctgagtttcttatataatttagattttaaatccttttattgttattgaaaatatactgtaaatacctttcccagtctgttgatcatttgttagctttgtctgtgttgtcatttatagagcagaaaaccaccaattactttatggtttggactttttgtttcttacttaagaaatgtttccctaacccagtgtcataaagatttgcctataaacgttttagcttcttaaactagctgaagtttgttttacatgctgtgagataggatctatttttattttttccatacaaccagatattttccccaacaccattaaaataatccatcttttccttactgatttctgttgtcaattctatcacataccaaacatccacatacacagttctgtttctggattcttctcttttgtcccactagtccacatctggtagggtgatccccatctctgctcttaattttgaaaatagttcttttagctatttatggaactttattcttccatgcaaactttataatttgcttctctaattcctctcccccaaatatttggtaataattacatgaattgacaccattacactgctatttcttaccgtctacaaacagtacatttcttcatttacgcaggtcttcttttatctcctttgataggttttctctaacatgtttggttaattctagataactcattttcttaatcttctttttttctcctttaaaaaaatagtctccaatttcatagaagggaatagtatcttcttcccaaacagccaagttttattatttttttgtttgtttgtctgtttttttttgtttgttttttttttagtagagatgggggtttcaccatgttgaccaggctggtcttgaactcctgacctcaagtgatccgcctgcctcagcctcccaaagtgctggggcgtgaaccaccatgccaaacaaattattattatttttttagaactcaggatcttgctctgttgcccaagctggagtgcagtcgtgtgatcatagctcactgcagccttcaattcctggatgactcaaaggattctcccacctcagcctcccgagtagctgggactataggcatgagccatcactcctagataattgacttaaatttttttttttttttagagagagggtctcattatgttactgtggctggtctcgaactcctgggctgaagtgatcctcctgcctaagccttccaaagtgctggaattacagacgtgagccacagtgcctggctctcagccaagttttcaataccattcccttcatgacactgcctcctggatcacctctttagtaagagatgaacccagaaatccagaccctacacaaaccaaacagaaccagtaaggcactagtcagatgggcacctatagaagttgttaaagcatgttggggactctaaaagaattttagaaataaaatgacatggagaaaattatattaacctgacttattctcaaggctatgactatacgtatttgaaggtgatatagttgactcttgtactttgtcagggttaggggcaccaacccctgtgcagtcaaaaacccgaggataacttaactccccctaaacttaactaccaatagcctactgctgaccacaagccttactgagaacataaacagtcaattaacacatatttcatatgttatatgtatcacatactgtattcttacggtaagctagagagaagaaaatgagctgggcgccaaggctcatgcctgcaatcccagcactttgggaggctgaggcagaccgatcccttgagtccaggagcttgaaaccagcctgggcaacatgacaaaaccctgtctctataaaaaaaaatacaaaaacttggctgagcatgatggcgggtgcctgtagtcccagctacataggaggctgaggtgggaggattgcttgaacccagggaggtcaaggatgcagtgagcagagatcacgccactgcactcctgtctagacaacagagtgaaaccctgactcaaaaaaaaaaaaaaagagagaaaaaagaaaaccgtaagagagacaaaatatatttaccatactatacttattgaaaccataagtttatgttattgatttacaagaagaattgtctgcctgaaaaggcaagcaacctcagctgcagacctcaacctatgatacatatcaagcaattccactctttcttataatatcacaatttttctccacttcttgggagtacttcctgcattactggtagcacttgttatgggtcccatgatgtcattcaaggtttatggcattgcactaaacacagcgaaaaatacctaagaactttgtgagatcactttttactgccacaggcaatttactggagagatgaactgctcatgaagagatgattagcagcacacagcgtcttaagtggaaacttgcaacccttgcgctcacagcaatagcaacaggaggtggctacgaaattattacagtagtaccgtatgtgctatggttttttgtttgtttgtgcttttttcaagacagggtcttgctctgttgcacaggctggagtgcagtggtgtggtcatagttcactgcagccttgaattcctgggctctagtgatcctcccatctctgcctcctgagtagctaggatgatagtcatatgtcactacacttggctattttttttaactatagttaattttatgcaattatgagttaatactgcatcttcacatttgttcacatttctcttaactgtgaatggcaccatgcaccatctgtttgcgtaagttttgatgaattttaactttttataatagatgtgtgtatattttatggtggtaaatgataacaataggtaagtatttgcatattttcatacgttgatgacatatttcctttttctttttttgatatttctaaggtgtgtttcatctgcaggttttttcaaattgtcacaaatcttcaaagacatttcaatatatttattgaaaaaaatctgcacataaatagacctacacagttcaaacctgtgttgttcaggggttaagtatacttttaaaataaatacttggagtgttggagaagggaagatgatgttaaactgccttctaggaagacagctatgctttactacaggactctagtttctttaagccagtaatgcaagtttggggccagagctgaattgcttgtaatagatgatgcaaagtattgtcacaagagatcttccttcccagttgttccttcatgcatgatccagcttctcttctgaacaaatgttgagcaaatgtttatttaaaggaaaaagtgacactgatttcttagttgctctgggcatctgcatatctcaggttggcaaggggtcttggcagaagcccaaacctagatgagccataaaatcaggtagacaccaaggtgacaacttggggcagggaccaaggtcagagccctgtcacaggaactgtggaacagacttcttgaattgggtagtggtccagttattgaaacaccagcccacatcccaacagaaaaaacagtaaaatatctgtctaggcaaatttccaaatgaagaaaaacaaatagcccatatgaaaaaaagaagtgttcagcctcattagaaaataaaacaacaaaggatattttttttccttgtctgattggcaaagtttcttttttcttttccttccttccttccctccctctcttcctccctcccttcctccctccctcatttccttccctccctccttccttccttccttccttgcttccttccctccttccctccttccttccgatactcattgttgagggagtggtgaaagggtattctcaagcacagctggtagttgtgtgagctggcacggcttttctggagggcaatttggcagactgtatttaaaaattctaaagacacgcactgtttttgatcccgcaattctacttctagggatttctcctaaggaaataattagaagtgaatacaaagatgaataatagcagcttaacatttacagggtgttcactctgtgcaggcagtatgctaagcacttacacttaactcatttagcccttatagcaacatgcaatgtgaggagtattgtcaagtccatttttaggtggggaagctgagtcccaaggaggtggtgtaagttgattaagttcaagtagctagtaagtgacaggatgctcaaatcctgatctctttaactccaaaacccattctctgaaccaccttgttatcctatcctctggaacactaagtgtaaaaaagatgctctacatagtaccgtttaaaatggcaaaaattctgaaataagctaaatgtgcaagaattagggaacattaaataaatcatgtaggatcatatgataaaatacatagtcattaaaaataagttctaaaacaacgacaccaggaaatgttcatgatatatcaaatgggtaaaataatgtataagttatgtcccattttaattttaaaaatgcatatgtaccatttttatgaagtttaaaaataggaaagaccagggtgtaatgatcaaggttggaggggaaaggggtcgtcgactgggaagcctgctgggttgcatggatgtttacatacataaaaattaagccagtagtgcagttaacatttgtgtgctttatacaagtttatgtaagttatatctcactttaaaaatacataaatgcatagaaaaagccctggccagaaaaacaaaaacaaaaacaaaaaaacaacgttagcagtgattgttgctaagtataattttcattttattctttatactattctgtgtatgtgtgggctttttttattttccatttttttgttttgggggttttctttagagatggggccttgctatgttgcctaggctggactcgaactcctgggctcaagcaatcctcccgcctcagcctcctgagtagctaggattacaggcatgtaccaccatgcccggccttctgtgctttccttcccctgcatttcccacccttccaatgagcctgtattatcttattcttgggggctgggggagaacatgcacatgacggccaggctgtagtccagacctagaaccctggaggtggcagagcttttcaaggactccagtgctgggcgccaacctgagtctagtcttgcaggtacaacacagtggttccaaggatactgagaatggtgaggtccagtggccagcctgtttggaggatatgcgagtgagaatccctgagtagccttagatgaactagaagcaacacccttaagataagttcctccgactttaaaattcagctgggcaaaggctgcatgtagccatcctggccacggagccatcctggtcacagcaacaattcattgttcagctgctggttggatgccttgttgctcactggtgatgacatcaggtctccagggagcacactggctgtcaatcagaagcctttttctggcagcagtgagccatctctgcctcctctctcttttaaaggggcagcttctgcctgggcaagggagctaggtttgggccaccttgattctttctttccatttcaagtctaatttccagggcagtggagatattaaagaagagcaaggtgggttactgtgggtgtttctcaagatcccagcttcagcttactcctgacaataaaatcttgctaaccaagacatggatcaaaataaagatggagctaaaaaattaaaatccagtggatataaaaaatttcactaaatgtttttagtggatctaaaaaaattatattttaaaaatctttggtatataaaattgctggtaaatactaaacaggcttaaatataaaatgaagaaaaataactgagaattatcagttatttccatcttccttactaagaaatactaatttgattgaggccatcaaatgtgcctagttaaaaaaaaaattcctcatttcctagcttctgttgcagctaggggtggcatataacacagttatggtcaatgaaatgcagactaggaatttgcagaaaactttccttttctgatttagtcattctctcctttttcctgggtggaataagaacatgatggctggagctttagcagctgttttgcaatcaaaaggaaaatcccaggagaattacacagacccttcaaccctgacatccttgaagcagtgaaatggtgacggcaactgcctaactcttcaccacttgtttatttaagacactggctactcaggctttctgtaattcatggctaaaagcaatctttttttttttttttttttagatggagtttcgcttttgttgcccaagctggagtgcaatggtgcgatctcagctcactgcaacctatgcctcccggattcaagcaattctcctgcctcagcctcctgagtagcggggattacaggtacgcaccaccaggccccactaattttttgtatttttagtagaaatgggctttcaccatgttagccaggctggtctcaaactcctgacctcaggtgatctgctcacctcggcctcccaaagtgctgggattacaggcgtgagccaccatgcctggcagtctttaactgattcactccattgaagtaaaaataacaacacagtaaaacgggaagtttggggagaaaagatggaaagagtataacagtgccagtgttttattacatgtagtcaccatctaaaattgatatataaggctaaaaacaacaatgtctgcaacctcttaatgttttcaggagggatctttaaggggctcatatatttcttttggtggagaaattgttatctaaagttcataaattctttctttacatttgtttctaaaattccaataaattcaagtaaaataagtgaaatacccttcaaaacttaagaagagtattataatatgaaataatttttagaaattatttctgattacctatctgtatagatgcattgaaagatgtttggagtgatgttcacctcatttgaattatgctcatttccggctttttatttttgtttttaaacttttaattttgaaatgattgtagatttacagaaaagttgtaaagatgggaaagttctgatttcctcctcactcaacttcctctaatgtcaacatcttatgcaatcatgctacctgtataaaaagtaagacattaacttggtaattattatagtatgatgctgttaaccagaatacatacttcattcagattttctaatttttccactgatgtcttttttatgttccactttccaaaccagaataccacattgtgtttagatatcacatctccttcgtctcctctggcctatgacagttgcttggtttttcctttcctttcatagccttgacacttttgaaaagtggtggtcatatactttcagaatgtttctcaattttggcttgtctggtgttttctcatgatttgactaaggttttaggctttggggaagaaaaatcacagaagtgatgtcttgtcatcccattcattacatgaaagggcacgtgatctctacatgacctctcactggtgatgttgaccttgatcatttgactttttcactttattctttgtacttttttatattgctttaattccttataatgagtatgtcataaaagggaacttggaagtgctacatatgctgaagaactccacaaatgtgagggttaaatttttcatttgaaagagaggattgatgtccaaggcttggctgaaagagggaagagaagataagtatagctacgacatcaatgttaattgcctggaggccagccagggtggcagggaaaaatggagatgactttgagattatgtaactgctagcagagcaaagagtgagggcctcatacaaatatttcttaatattgatacatttccctttagcctatagccctagttgagagtgggggttaccccactggccaagttggaaatggcataacagcagagagctgattctgttgcaaaagcgagtgggcatgggaactaatgttaattaagcaccaggtatgttccaagtgcttgactaaatcatcccaaccctgcctgctaagtatgctggtcatctccattttatggggaaatggagactcagagaagtgaagtaacttgtctaaagccactcggccagttaaccatcaaatgtctatcaggcaatgtaccaggcaggcacaggaaagctactgtttgaatctagatctctgtgacactaaagccacactcttccccccaccccccacatacacacactttacaccacctgcttcccaggaagggccgcagacacgtacaggaatcccaattatggggaaagaagatgagcttctgagactattccgatccacaagatttttcaaattcttcacaatctctgtctcatggatcagagagatccatgaatccccaggtcaagatcctactaccctctgaatgatttggacagctgttctctgcaatcagatgggggaaagggcttggggtagctggaacagccttccgctatccctgctgttgacaagaccgtaggatgcagggagaaacaaagaaagagatggcgagagaggggagggaaaaagagaaggaggggagagagagaaactgcttagttttgaattcctttttccagttagccctaaggccagctcccaatccctcctaaggatggattttagcaaagaggaacccctttttattaaagctagttcaaatttggtttctgtaacttgaaaccaatgtgggcacatgggcggggccccagtatcatttactatctagtggtaaccatgtcactgctgatttttatggtgaaatgataaggtggagaagcggttcaccttcagctggtgctgttactgttgttgctgccactgccagcaacatggggcttggtggtggtggtagtgacgtgcgatggtggttgtgagtgtgacgattattggaggggctagcgattatgggtaccaaaattccttggcagagatgctggttattggaggggctaaagatcacaggtaccagcatccctatttcttcaaggtttgtctctttcttttacgctttgtatttctacaatggccctggggagtgaaaagacttagaatttcatcttgtcaagactggtagatgaaaacatgactgaagaattgatgtgcattcattccaccagttaagtcctgttgtgtgtacattttttaacaatgcttgcattccctggggctgcaatttattctacttgccatgatgtcatggttcactgtgaaacacaggagcgtgttgacttcagacttctcaacacattaaacctatgagcagagtgtaacctgccaacgttgtgcccggaagtcgtgaagacttctgggatggattcatcctgcatcaatgagggctagttgttttcagctaaagcttgtgagtatgagggcacagggaccgtgcttgtgagtaagcgggccggcatgctgctgggggtgcgtcaggtagagagactatagcgtgtgcatctgttcctctctctcaatgtctgcccgaatctccttcgccctccccagagtgaagcagtgaggcaggagcaatgctcacatttcactccaagcacctaccttgttatattttcaacaaaatagctttctacctaagaaatattctgggacaaatgtaaagcttattcatccattcaattaatatcggtgatgagccatgcactcgtctaggtgctgggggtataagagtggaaggaaggaacccacaaatccctgctcttatacagctgacattctagcgggtttaaacatgtctcattctcatcacacacaggtgaggaaactgaggttaattgacttaactgaggacaaacagtaaagggcagagctaagattttaagtaagatcagactgatccccaaacccatgcccctgaccaattctatgttatcttcagtgaatattttttaaaaatttgtactgcccaacatcttttcaccattctttgggtactagaaacctccattacttctggtaaaccactcttccagtctccaagatcatctagaaaaactccagtaaaggcatcctgtcctccttcaactgaagaacgggttcataacccaaatatgtcattccaatgctgctttctgctgtcaagacctcctggaagtatgactcttttcgctctcaagttgatttttcagctctgcctatgattctgtaagccatcccatatttttccaatacactttttttatccagttatacagagttcacttctgttgcatataaccaaagaatgaaactaacacattgtcccttcaccctctaggtcttaatttgacccaaagcaggttttgtgatctactaactagaaagtattgcacccacctcccaggaaagaaatcttgtttacttgagccaggcctgccgacatccctggcttctggccccttgttcagacctagccttccaggaaaagcttccctgctctgcaccggggctgccagacttgcagatgctgcacactcagcaaaagcagtggaggagcctgagctatatttgaacttctctgagagcacacagacacagccccctgtgctctggctggcggaggggactggtaattaacagtactcttgttcagagcacaaatggaacaggtgatggatcagcaagttcagaatcagagccacagccaatctctccatccccaagtctatttttgggtcaccacagatgcttattaacaccacatatcagggctacaggacagacaagagacttgtcttggggaacttgtcagtcaaaattacattgagttttatgtaacaagtctgaccagataccgtttttttcccctcacccaacaagaagtccagtggtaggcagtccaggcgggtatagaggctcagagaaatccttaaggattgaagctctttttatcttcctgatctgctatccttagcagctggctctcaccctcatagtcacaagatggctgccccacttccagaagtctcacctacattccaggtaggaataaaagcaaaagcaaagaagagaaggcatgttcctgatgagttttccctacccctttgtatgaggaagacaagagattccaaggaagcctcatccagattttcctgtacatctcattggtcagaactgggtcagaggaccagctgcaagggtatttttaactgggcatattgtcattcaaacaaaactgggattctgttactaagtaagaaagggagtaaaggcattggttaagtaactagtagtgtctgtcacaaaaggtaagatgggaaatgggtcatgatcgagggaggcctccaaggggcttagtcacaggttctcaggagcacacaaactggacccatttccagggtccccatgtggaaaggcagagggctggaggaaggtcttacggctgttcgcagccccgccctcgttctcatggtaacctacagagaaaaccaggagccacatgaatctatcctttatttatttatttagagatggagtctcactctgtcacccaggctggaatgcagtggcacgatctcggctcactgcaacctccgcctcctgggttcaagcgattctcatgcctcagcctcctgagtagctgggattatagacatgtgccaccatgcctggctaatttttgtatttttagtagagacagggtttcattatgttggccaggccggtcttgaactcctgacctcaggtgatctgcccgcttcagcatcccaaattgctggaattacaggcatgagccactgagcctggccaaagctgtcctttaaagatggcattgaggtcagagaaacgtgggaaaggtaaagaggttcaccaaaaaagagtcaaacagctctgatttcaaatccaagctctgccaaataccaatgctctgaccttgggtgaatcacttaacctctctaaaatgggggtaatactttgcacatgttttgtgaggctcaaaaaaacttcaggtatacattgtatatcgtagctatcccaaaaatggtcgttattattacattaattccctccttttctaaatggtgaaaatgaacccagagaggggaagcaagatgacctaagtcacacagccagatagaggcagagctgcgaccgggcccaggctatctgacttccactctgaggggtgttccctatcatcactgcctgtctctgtaacaaaatgatgaacattcattaaagtgtgaaattaggcctgaatggtagaacaaagtcgctgatttagaattttatttaaaaacacaaacctcaaatttcagacactgaagatgccaaaagtcaagcagaaaaggtagaggcatcctggtgtgcccctcctggtgaattctactcattgttactgtcatttactaagtgcaccagccgtgtgcctgacatcacgctaaagcgtctacctaatggcagtagctaacattcatggaacactatgttagtttcctgtggctgctataacaaaatcccacaaacttagtggcttaaaaacacatctttttttttttttttttttttttttttttttttttttttcagagacaggttgtcactctgttgcccaggctagaattcagtggcatgatcatagctcactgcagcctcgaactctcaggctcaagcgagcctcctgccttggcctcctgagtagctggaattacaggcatgcaccaccatatccagctaataaaaaaaatttttttttcagagatagggtgtccatgtttcccaggctggttttgaactcctgagctcaagccatcctcccacctcaacctctaaaactgctgggattacaggagtgagccaccacacccagccaaaaacacaaatttattctcttacagttctggcggtcagaattcctgagatcactgtgtcagcagggctgtgtttagtgagctcgttcccttgcttttttcagattctaaagtcacctgcattccttggcttgtggccccttctttcgtcttcaaagctggcagtgtagcatgttcaaatcaatctctccccaccacacacaaacaccctcgcctctgctttcattgtcatgtctcctcagattctaaccctcctacctccctcttccattttcaattatattgagtccaccaggataatgcccccatctcaaaatccttaattgaatcacacctactagatcctttttgccatgtaaggtaacattcacaggttctggagattgggatgtggacatctttggtagaccactagtttagctaccacaacttttatgcacctggaattgctgtgaattcatataaccctctagacaaacctaggaaatacatactgaggcgggatagataggcaaggaagtaacatgtccgcaggccacaggaaccgtggctgtgaccgtgactgtcaacacagtaagccccagcatttgcattgtagtccagctcatgcaagcaaagctatctccagtagggaatttctcctaggaagagtatgtgcattttgattttacctgtcctcagactgacccttgttcattataatagtaaaaaacacacccctgggtggagatttaagatgctactgagacatgcagtgcatgaacaagcatgtgctacccgcacatgttcacccagaggaccatccaaaacatgcttgctagtaacacctcttcctatccccttaggtaagactcccataaaggaagtttccccgcgcggaatcatccctcagggtggactgtctattctgtacctaactttcagaatattctttctcctttgcaataaattgctctgtgctgcatctcctttgctgtgtgtctcttgtttaacccactgccatttaggaaaaaaaaaaaagtgcagctggctgccagcactcatttaactttacattatcatgctctttgaggctgaagcaaatctgactgattttcaatgtgaaaataaaatataaaatctcttcttggagttatttatttcttttttctttcttttttttcttttcttttctgagacaaggtcttgctctgtcacctgtcaggctggaatgcggtgttgtgatctcagctctctgcaaactctgcctcccgggttcaagtgattctcctgcttcagcttcccgactagctggaattacaggtgcccaccaccacacctggctaattttgtatttttagtagagatggggtttcaccatgttggccagtctggtttcgaaatcctggcctcaagtgatccaccggcctcagcgtcccaaagtgctgggaatacaggcatgagccaccatgcccggagttatttatttctaaacagaacttgtctctaatcctaatgtaacagaaatgtatatgatgatcagtatttaattttttttcatgtggtgaattgcaaagcccagaacaacacaaagcagaacatcacattccacacaaaaatttcacctttctcgtcagatcttcttgccattcctgttgtgtgagcagcagactttgcagccaccaattggactctgtttccctgatgtaggtggtatgctcctggggaagtgtcttccagacaggtgaagaggtgtgacatcatcagagcacagacgacctcaaagacgttaccaccctggcttggggtgcttttccagcattcttccaatcagtgtcagtctgaaatttacatggctaatcgtgtcctcaggattgtccttctctagcaggatgtaggagttccgcactgccatgtttagaaggtggcgaaagagtttcttataccaaaccttgtgccttttgtgctcagttggataagaagagagcatctgatcaactgagtccactgttcccatattctcgttatattccacaatgacacatggcctcttagttttatttccatttctgtggtctacctcaataacagtatcgttgtggaatgttgaaaacattgtcacctccttgtcagaccattttggtgccataaattcaccacagaattaacatcatgcataggaatgctatgttttctaggatttgacattttcagtgattgagaatcactgtattttgtaaatggaaataccactactaaaaagagaatgctgtagaatgatgtctgcccgagagttatctcagggtaaatgctgcagctgcacaagtattttcagggcaaacgggaaatgggttaaatcattttattttattattaatattttttgagatggagtctcgctctgtcatccaggctggagtgcagtggtgcgatcttggctcactgcaacctctgtctcctgggttcaagcagttctcctgcctcagcctcccaagtagctgggatttcaggccaccatgcccagctgtttttgtatttttagtagagacagggtttcactgtgttggccaggctgatctcaaactcctgacctcaagtgatccacctgcctcggcctcccgtgtgagccactgcacccggctggttaaattattttaaactaagaagataagaactgaggtttcacaacagctatcaccaatactatcattttgcccattttcaattgacaagccatgttagtttcctattgctgctacaacaaattgccacaaacttagtggcttaaacaatgcaaatgtgtcatcttacagttctgctggttacaagtctacatgggcaccttgggctgcgttccttcccgggactacctgcattccttggctagtgaccttgttcatctacccagcaacaatgatcaagtctttcttatcactccaactgttcttctgtagtcgcatcttcttccctctgaatgtcctctcctgcctccctcttccacttttaaagaccttcgtgattacattgggtccacccagagagtaacacagaatactctccctgccttaaagtcaggcaattaggagggttttgtttttgtttttgttttttgagacagggtttggctctgtcatccagggtggggtacaatggcgtgatcttggctcactgcaacctccatccgcctgtaggactcaagcaagccttctacctcagcctcccaagtagctgggactacaagtgggcaccactttttttttttttttttttggtagagatgggctttcaccatgtttcccaggctggtctggaactcctgggctcaagcgatcctcctgccttaacctcccaaggcactgggattacaggagtgagccaccacgcccggcagattagcagtcttaattccatctgcagcctcaattccctttgccatgtaacctaacatattcataggtttggttttaggacatgggcatttttgggaggccatgattgtgcctaccacacaagccaaagacccagagaggctaaataatttgccacaggttatatggctagaaaacggtagagccagacttcaaaagcaggctgaccccagcactttgaatgagtgctgacccaagcactctcattgttaatcattgcactacacttccgtagctcgttttcccttctcagcaaccctactgtgaggtaggtatggttatgactgctatgtgcagtttacagttgaagacatgaagactctcagggatgatgtggcttgcccaaagttcacacaggtagtggaaagcagaggaaccaggttagtcggactcagataagagatgtacccaaagccaggcacggtggctcacacctgtaatcccagcactgtgggaggctaagatgggaggatcacttgaactctagagcttgagaccagcctgggcaacataggtagacctgtctccacagaaaactttaaaaaatagccaggcgtggtgatgtgcgcttgtagtcccagctactcaggaggctggggtgggaggattacttgagcctgggaggtcaagcctgcagtgaactataattgcagcactgcactccagcctgggtaactgagcaagaccttgtctcaaaaaacaaaaaaacaacaaaaacaaaaacaaaaaaaacaaaaacagagagagagagagagagagacagaggtacccacaatgaaaggaagacattggctactgtgagagtgagattgtcatccttaaaccaagagcatttcagctgggcgcagtggctcacgcctataatctcagcaatttgggaggccaaggtgggtgggtcacctgaggtggggaatttgaggccagcttgaccaacatggagaaacgccatatctaataaaaatacaaaattagccaggcatgatggcaggtgtctgtaatcccagctactcgggaggctgaggcaggagaatcgcttgaacccaggaggcagatgttgcggtgagccaagatcacgctattgcaccccagcctggcaaaagagcgagactccatctcaaaaaacacacacacaaacaaaaaacaaaccacaagagcatttcaaatacttttgctaaaatcaacagctcttcccttaggtatcccacagtactggactactctcatttccttcagacctcttctcaaatgtcagctactcagcgataccctgaccaccctatccaaaatagtagctctcatgccccaacccccattctcttgtctcttctcttactgcttgtcataattatgtaaattttttgtgctagaacaaatgcttcatgagagcaggggctgtgtctgttttgtacactgctgcattcccagggtctggcatccagcaggcactccataattttttagtctgaaatcaataataacttaatccaatctcaatattctcatcaatggacttgagaataagcaaatgttattaatgtatctacattagatactgggactcttggcatttcaattgaaaaaggctttcggagatatgaaggactggaccagcaagagattctccaagtttctagccttggctggtcatgaaacttttaagggaaggccaggcacagtggctcaggcctgtaaccccaggactttgggaggccaaggcaggcagatggcttgaactcaggcgttcaagaccagcctgggcaacatggtgaaaccccatctccacaaaaaaatacaaaaaattagccaggtatggtggtgcacgcctgtagtcctagctactcaagaggctgaggtgggaagatggctagagcccaggaagcagaggctgcagtgtgagtcaagatcatgccactgcaccccagcctgggtgacagagccagactgtgtctcagaaaaaaaaaaaaaattgtaagggaagcttgattaaaacaccaatacccagtgcctaccctcaaagattctcattgaattggtctgaagagtgttctgaacatcagcattttttaaggctctccaggtgatgctaatgtgcctctgtggttgccattcacagccctggacctcctaaactagaatccctgggacaaaggttttcaaccttgacagagctttggaaaatactgatgttggagtaccacctccaaagattttgatgtaattaggctggatgaggcccagggaatagatttttcattttcgttattatacttctcagctccagaatgtctatgtagcgccatacattgttttcctgatttccttgagttttttattcaagatttcctttagttctttcagcatattgaacgtagctgatttaaagtctttggctagtaaatccaatgtctgggctttctcagggacaatttatgtccatttattttgctcctttttttttttttttttttgatacagagtctcgctctgttgcccaggctggagtgcagtggtgcaatcttggctcactgcaagctccgcctcctgggttcacgccattctcctgcctcagcctcctgagtagctgggactacaggcacccgccaccgtgcccggctaattttgttgttgttgttgttgtatttttagtagagacagggtttcaccgcgttagccaggatggtctcgatctcctgacctcgtgattcgcccgcctcggcctcccaaagtgctgggattacaggtgtgagccaccatgcctggcctattttgctccttttttaactgaaaaattaaagttaactttacacttgatgggtgccaaaagtcttgcacccagatcagctgcagacaagaacagaaattttaaacaaatgagatcaaaatcctgaagcattctccacagaactgtaacagggatgaaacatttactagtataatcctgaagacaaagcacaatcaaagcaatggctaccaagagatggaagtggttcagtcaatgcaaaagcaggctggtcaagagcaaagatcatggcaactgtttttggggggatgatcattttacttgctgactttctagagagccaaaggataataacatctgcttattatgagagtattttgagaaagttagccaaagctttagcaaaacaaagcccaggaaagctcaccagagagtccttctccaccatgacaatgttcctgttcattcctctcatcaaacaaggtcaattttgcaaaagtttcaatgggaaatcattaggcatccaccttacagtcctgattcagctccttctgatgtcttttttgtttcctaatctcaaaatatctttaaaggacacccatttttctttagttaataatgtaaaaaaaagatgacattgacatggctaaatccccaggcctcagttttttagggatggactgaatggctagtatcatcacttacaaaagtgtcttgaacttgacagaacttatgttgagaaataaagtttatgttttctgtttttatctttaatttcactttgccccaaactctttgaagtccccatatacatttatctttatataagttaggtgtgtaaagttatgtctatatgcatagattgctgtctggaacgatgttcaccaaaccggtaggggcgttaagggtgatttttgctgtccttattgcacttctctaacttgcttatgatgtacacatactattttcacaaaaggaagctggacttatgggttgagaggactgattaagcacatcagttcatctcttctctctccaaatatcccattgaaatgataacacaagcattccaaaattctaatgaaaactaacaaaataataataataataataatgcctacctctcagaattgtgaattttaaaatctggcacatagtgcttgatgattattatctgcatttcccccatccacttatagtcctaaagataacattattatagatgctcttaacccttcttgtgacatgaagttctttgcagtctggtggagctcaaggatgccttcttagcataatatttttttattaataaaattatatatataggattataaaagaaatcattcgtgttaaagtacatttatcaaaatgtttaaaaagtaaatcagtcatagaataacatatgtgcttttacaagatttggaacatgtctaataatgaccatgatttcaaagttgtgatgaacgtaagtgatattttgaaataatttcaacaacagcaatgtgatggggaaaatacctgatttctattgctgatgaagtcacaggaacacgaatactactacagtctcttctttattttcataattgaagaaaatgctaagtttgagctgaactttgtgaaaataaagacaatttttctcataatccaacttcatggatgtcctaatttaataaaacaggtttccatatgtctttgccgaagtctgtttatctgtttggtctctttcttatttattacagactctcctcaaatctactattctttacattgtattagcctaagtaaaaaaataataaaaacctatgatgctccttgacagtttgcttatattgaaggatgagacttagactaaaagttattggaagctatgtgcatgtgagcagggcttattaactatgagctttgatgactattcattagtcatcagtatcaggatctttacatctttccttctgaactggtcaaattctccagaaaagactcttctagcttctttttaggagaggataatcctcccttagagagtatagtcctgggcagtgcagtttttcttttctttctttttttctttgagacgtggtctcactctgtcacccaggctggagtgcagtgatcatggctcactgcagccttgacctcccagattcaagcaatcctcccacctcagcctcctgaggtgctgggactacaggcacgtaccaccatacctgctaatagtcttttttttcaacctaggagtctcattatttgtttaggatcagcattatttgctcagagtcagcattctagagtgtaggctgggaaagaagcccgagaagcaactgggcagagcatctcaacctcccttatgtgaactttcacttaatccttctgctttcagtccgaagaccctatctttcactatgcttggtgtctctcaagccagataccccttgtcttgtagtctgcagcttgctatccaataaagtaccctctagtcgcatgtggctatttaaacttaattaaaataggccaggcctattttatacctgtgatcccagcactttgggaggccaaggtaggtggatcacttgaggtcaggagtttgagaccagcctagccaatatggtgaaaccccatctctactaaaaatataaaaattagccaggtgtggtggcgagtgcctgtaatccctgccactcgggacgctgaggcaggggaattgcttgagcacaggaggcagagtttgcagtgagccaagatcatgccacttggcactccagcctgggtgacagagcaagactccgtctcagaaataaataaataaataaatgtaattaaaataaaataaactttcagcttctcaattgcactagtcacgtttcaagtgctctatagccacacaaaggtagtggctggctactgcatcagacagtgcagaacatttccatcactgcagaaagttccattgaacggtgctgctcaagaaccgggattggcaaattttctcagtagccaggtagtaaacattcctggctttggatgccatatggtctccattgcatccactccactctgtcattgtagtatgaaaacagccacagacaatatgtggactattttcttagccagatccaacaggctggatctggcctgcggaccatagtttgctgacccctgtctgaatgtactgccttttaaaaaaatccctgtactgttattttagtggatctagggaaagcagagtctaagatacacagtttttttttttctttaacctacaagtctgattatatgttcaggacttgtctttttcctacactttaggatccacaagcacagagccctgtctttcttattcactattctccacctagtgtccagcacagtccctgacatgtaattgtcttttagtagatcatgttgaatgattaaatgctcaccaagccaccctctgtgtaatttggcttttcacttggatctgccttcaggaaagaatgtgctggttttgctgagtagatgtcagtctgcttaacaattatatttcatgttatcaatgaatacattgacattccgattttccatctcagtctcatgagcttggtaaatgtaattccacttctgagggaagacatcagctgctaaacttgtgtagaatcaaacaaatcttggttacagaagtgtgaagtcacaattgaatttgataagaagacttgtaagagacgggaaataatttggaggacataagtacctggagaattttaaatactgcactgaaattgccctctcagcaagataagcaagagaaggttatgtagaatgttaacattgctgtgactgtaatagaacaatatgccaagggcgttgttggaaattggtctggtggggcaaaagccacaggatagatgaaaactatacgtgccccagaagagtggctatcttagagcttactgactgggaggggaatgagggagccttctggaatgctgggaatgttctatattttaatctggtggcggtttcacaggtatatgcatgtgtgctatttcattctgccatgctggtaagatatggcactttatcttataactgtatgtaagctatttcttatttgtttcttaaaaaagaaaggaatcatgagggaaatgcaaatcaaaccacaatgagatatcatctcacactctttaggatggctactatcaataagtcaaaaaaaaaaaaaaaacaagtgttgtataggatgtagagaaattggatcccttgggcactgtttttgggaatgtgaaatgatgcggccactatggaaaacagaatggcagttcctcaaaaaattaaaaaaacagaattaccatatgatgcagccatttgccttctgggtatatattcaaaagaattgaaaacagagttttaaagagatatgtgtacaccaatgttcacagcaacattattcataatagccaaaagtggaagcaacccaagtgtccattgatgaataaatgaatgaacagagtgtgatacatgcatacaatggaacattcttcagtcttagaaaggaagcaaattctgacccatgctacaacgtaagtgaaccttgcagacacaatgctaagtgaaataagccagtcacaaaaagacaaataccttatgattccacttatatgaggtacctagattagtcaaattcacagaggcagaaagtataatgggggttgccaggggctgggtggagggaagaatggggagatattgtcaaataagtacagagtttcagttttgcaagactaaaagaggtttttggatggatggtggcgatggcacaatagtacgaatgcagttaataccactgaactgtacatttgaaaattgttaagatggtaagttttatgttatgagtattttaccataatttttaaaaagtaagaaataatatatatataaatttttcctgattatattacagttgttcatttttcctcatgttcagcaatatttaatgagaagacacgtggctttctgagagatactgctgtaggactacacagattgtaaatacaatctttaaaccataaaactcgtaactgtttaactagttgttataaaacatgtttgttaaagaaaactttacatggccacttgagttgtagaaagcagaggcgaccagttttgtgtggttatttttgcccaataaagaaggtgtaaatttttcactgggcagagagcattgctgaatacacagtcgtgctggggcctcccagtggttggtactatagagatggaagttgcctttgatagatctgatccagccaccatggcaagctttgtttctcccacacctgcaagattgagagctaggcttgagcaaatatgctgcattaaggaaatccaacctaagaggtatcttggaagacagacagcttcagcaggccacacttctccaccctggtgaacttctatatctgcactaaatatgtattacttctttaatgaaaaaaaaactcatacttttaatcaatcacttacatagtgcttgctatgtaccattcactgtccttagtattttataaacattaatttactggccaagcatggtggctcacacctgtaatcccagcactttgggaggccaaggaaggtggattacatgaggtcaggaatttgagaccagcctagccaacatggtgaaaccccgtcgctactaaaaatagaaaaaaaattagctgggcctggtggtgtgtgcctgtaatcccagctacttgggaggctgaagcaggagaatcgcttgaacccaggacacagaggttgcagtgggccgagatcacaccactgcactccagtctggatgacagtacgggactccgtctcaaaaacaaacaaacaaaaaaacattaatttatttaactctcataacaaccctaagaaggtacctaatattagtacctaagaggtaggcactaatagtgccatcatcatattctacaaatgaggaggttgaagcacagagtggtcaagtaaccagcccaaggaaagcttacaaatggcagagctgggacttgaacccaggcagttagcacctgtgcctgtgctgtcaacaattatgctgcctccaaatcaggcagaatgaatttcttggtgctggggggtatccaagttcattggtgctgctatagcaaaatagctgagactgggtaatttataaagaagataaatttattttttcacagttctggaggctgggaagtccaagatcaagatacagatactagcaaatttggcgtctggtaagggctgctctctgctctcatgatggcaccttctttgttgcttgagatggactctcaccctgttgcccaggctggagtgcagtggcatgatctcagctcactgcaacctccgcctcccaggttcaagtgattctcatgacatagcctctcaagtagctaggattacaggcagaggccatcacacttggctaatttttgtatttttagtagagatggggctttgctgtgttggccagactggtctcgaactcctggcctcaagtgatccgcccgcttcaccctcccaaagtgctgggattacaggtgtgagccactgcgtccggcctcatgatagcatcttcttgctgcatcttcacatggtggaagggggcaaaaaaggatgaatactgtgtcctcacatgacagaagagatggaaggtctaaaagggcctagctagttcttttataagggcactaagcccattcatgaaggtagatcccttatgtcttaatcacctcctaaagtccccacctcttcatactatcacaacaggtcttaggttccaacttataaattcaggggagacacacacactcaaaccatagcaaggagagaacaccttcatgtttcctttctcctttttctctctcctttccccacccttcttggtccttaatttcaaggaggggaaattgtgcaattttgatctagattggtcaaatcctacattataaaggatttttttcccgggacggttttgaagagagttaacaggtctatagcagtgtttttcagactttcagatcttccagatgtataatttttttctcaaaagtgttgggcaaagacttctgctgtcagtaatgatagagtaatagagaccagattgatcctcccttaaacaattaggaaaacaggcaaaatgatatgaaacaatgctttccatatactggacaacagacaatgaagactatgattcctgagagaaaaaaaatgagatgagccttaagatcaccccttcctgtgtggagacagttttcacaatgcagctcatagaagggaaactcaagcagaatggccaaagtggctagaatttacaggtaagagtgttgaagaggagtccagagttctcaacctcagagatctccaaggggccctcttgagtctttggctgtgtactgatttacacatatgtgagaaaaagtacccaaggccgggggggaatctgctggaaagcagtaggctaaagagctcatataaggtgagaaattgtttgtgattccaacagttaaaatgcagacacttcttaatatatcgggcatcaagcagagccctcataaggagactcatctcagtcatgaggctaaattagccgtagaccaaaggctattcagaacctgcctctgaaaatcttaaaagcaaggctaaaatgaacctagatgatcccatgtaatttaacagtgtcccaaaacaaagttcaatactacttaaagaaacacaataaaatccagcacccaattacaaaatttacaatatccagtgctattcaatgaactgttctccctcaaattcatatgttgaaaccaatgtgatggtaattggagatggtgtctttggggggtaactgagtcatgagggcagagacctcatgacaggattagtgcccttacaagaagaagcacgagatctttctttctctctctctctctctacccccaaccccctgcccgccaccatgtgaggatacaacagaaaggcagccacccgcaagacaggaagaaggctctcaccagaacctaaccattctggcacctgattgtagacttcccaggctctaaaatggtgagaaataaatgtctgttctttaagctatatgcagtatcacattttgtcatagcagcctgagctgactcaaacatttgcattcttggccgggcatgatggctcaagcctgtaattccagcactttgggaggctgaggcaggcggatcacttgagaccaggagtttgagaccagcctggccaacatagtgaaatctcctctctactaaaaatacaaaagaaatacctgggcatggtggtgggcacctgtaatcccagctacttgggaggctgaggcagaagaatcgcttgaatccaggaggcagaggttgcagtgagccgagattgtgccaatgcactccagcctgggcaacagagcgagacttgtctcaagaaaaccccacaaaaaacatttagcatcctataaaacattatcaagcatgaaaatttttactatcaattaacacaaatagacccagaaatcacagaaatgatggaattagccaacaagggtgttaacgcagctattacaaataggcttcttatacaaaatgatgtagaggaaaccatcaacatagtgaggaaagacatggaagatataagagaacaaaatgaaatttgtagagatgaaaaatataagacctgaaaagaaagatacactagataagattaacagaagattagacactgccaaataaaagattaaaaacttcaaggcatagtaatagaagagatctaaaatgaagcacagagaaaaaaagaggaaaagatgaaagagcctcagtcatctatgggatgatatcaagtggcgtaaaatacatgtaatccaaaggtcccaaaaaagtagaagagagaaagggaagggaccacaaaaatattttaagaaataatggctgaaattttcccaattttgatgaaaaatataaacccacaaatccaagaacctgaaagaactccaagtggaaaaaagcataaagaaaagtacgccaacgcatatataatcaaagtcattgaaaacaagtaataaaaagaaattcttaaaagcgtttgggctcacgcctgtaatcccagcactttgggaggccgaggcgggcggatcacgaggtcaggagatcgagaccatcccggctaaaacggtgaaaccctgtctctactaaaaatacaaaaaaattagccgggcgtagtggcgggcgcctgtagtcccagctacttgggaggctgaggcaggagaatggcgtgaacccgggaggcggagcttgcagtgagccgagatcccgccactgcactccagcctgggcgacagagcgagactccgtctcaaaaaaaaaaaaaaaaaaaaaaaaaaaaaaaagcgtttgggaaaaaaagagttgggaatcttttggagtgataggggctgttctatatcttcattgtggagcagatgtgtttatcaaaactgcatatgttaatcaaaactcataaaactgtttatttaaaaggatgaatttacttcatgtacattatacctgaagaaacttgacccaaaaaatatggaaggaggagatgggaaggagtggggagaaaagaagaaaaaagaaggagaaaggaataagtggaatgaggttgacccaacatggtcagataaggacagggaaaaaaaacagactgtttactatcatcatcataatttcattaaaaaacaagaactgtttggaaatagaaaagttggtgaaagaaaccaaggaaaaagaatcagctatctagcatttttactcttccaattattattaataaatatgctgttaggagaaattccctgttcccattaatacctgctgaaattttttatttccagcctcctcgtcagcttggaatgaatattagctaatatttgttgaatatttacatgtcagcactgttctaagcactttatttgcatcttatctcttaatccttttaacaacactaaggtagatattattgtagctgcactagaggaatgtggtttaacttttatgtaacaaagttgggaattgtttttctgttaccatggatttccaggttgaaggtcacataacctgagcatgcccagatgaaccaaacatgcaaccacagggggaccataagccctgggaccaaggaacagtgactgaattaagaagctcgggagttcttgaccagcctgggcaacagaataagacttcatctctaccaaaaaatattttgaagaagaagaaggaagaggaagaggaggaggaggaggagaagaagaggaagaagaagaaaagaagaagaagaagaagaagaagaagaagaagaagaagaagaagaagaagaagaagaagaagaagaagaggaagaagaagaaggaggaggaggaggagaagaagaaggggagggggagggggaatgggaagaggaagaggaagaggaagcagctctgaggtgaatgcaggatccaatcagactgtgctctggcatcaccccatgacaggatccagtcagattgggcctcactgcatcacctcattgcaaggtccaatcagatcacttctctttaccctgtgcttataaaacccgatccagctcccagctcagggagacagatttgagcatttcctcctgtctccttgtcacttggctcacaataaacctttctcactgcaaaaacccagtgcttcagagtttggcttcccgttgtgcaggggcaaaccaacctagtttgtttcagtaacgttattgtccccctatcatagacatgaaaactgagacttcgagtgaataagtaaattgcgttgaggtcccacagagagaaggtggcagagccatgtttagaacccaggcagtcgggctttagccatcattctgtgcacaagtgtttcctgggtaaggctcaccgtggggatggctccacaacgttcaccacccccataagattcctagggagttgcttgtgaattggcagaattgatcttgtcaaatacaatgtctggagaaaatgtttctctatctcccaatccgtcccatatcagatcctatgactataggttctctgataattattatattctccgtttttatgccacaaatccaccagaagtaaaataaatacgtgaaagtgatttgagggtactatgagctatacacagctaataaacatgtactaagcacctacaatctgccatgaactttcagctatagttttgctcccaatttacagctgctgaaactggggcctcaagaggataaatgacttgctatatgattccatttatataaagttttaaaaacaggtgaaactaattgacagtgttaaaacaaggctgagtaatctttggggagaaggaatgtgtagtgactgggaagaagcacagggggccaaccagttgttggtaataatgtgtttctggacatgggtggtgtttatctgagtgtatgagaaaaagacagaaatgggccaggccggtggctcatgcctgtaatcccagcactttgggaggctgagacgggcagatcacctgaggtagggagtttgagaccagcctgaccaacatggagaaacaccgtctctactaaaaatataaaattagccgggcgtggtggcgcatgcctgtaatcccagctactcgggaggttgaggcaggagaatcgcttgaacccgggaggcagaggttgcagtgagctgagatcgcgccactgcactccggcctgggcaacaagagcgaaactccatctcaaaaaaaaaaaaaaagacagaaatgaaattagctgggtgtggcgctgcacgcctgtaatcccagctacttgggaggctgaggcaggaggattggttaaacccaggagttcaaggcttcagtgagctatgatggcaccactgcactccagcctgggcaacaaagtgagaccttgtctctaaaaaataaatacttaaataataaacaaaaatggaaaagacagagaaaatatgaggaaaaagagattctgtcaaacataatctattataaagattctaaaagttttccactgatgtttaaaaaatattcatctatgaaggaaagagaatcagaccagtatcagatttctcatcagaagccaaaagccagacatcaatagtgcattatcttgaaagttttggaagagatttttaagctggaattctagtctcagccaaacataatcaaatgtgagggcaaagtaaaggcattttcagacttgccaggacagaggaagtttgggtttttgtagtctgtttatttaaagtaagaagaaaacactaaagtcttggttatagttgtaggacagaacataatgttaactatatcagtcagaagatacttggataatgcttggttgagttccataaactttattatgctgttgtagtaaataaatccaaactgtcagaggcttaagacaacaaaggtttatgtctttgacatactacacattgacaatacagtggcagggggctctgttctcctgaggatggctcagaggctctaccatagggaatgctgtaaggtatgacaccaggggagaaggaaatgtgtgtgtgtgtgtgtgtatgtgtgtgtgtgtgtgtggtggtggtgctcacaccagctatcaaatgttccagcccagaagtaacaaagatcacttcctctcacaactcattggccataactagtcacatggttacactcaactaaaaagggtggagaaatgtaattctcagtatatccaaaggaaatgagaactgggtaggggtagggagaaacctttgaggtctcgtccccattaaaaaatgacaatttataaacaaaagtgaggctgacaaaaaaatggaaacgggaagcagagaggaaagatggagagaaaagtaaaccatcttagaaaacaggattttattttatttatttatttgtttgtttgtttgttttgagacagggtctcgttctgtcgcccaggctggagtgcagtggcgtgatctcggctcactacaacttctgcctcccaggttcaggcgatcctcctgcctcagcgtcccaagtagctgggactataggcctgccccaccacacctggctaattttttgtatttttagtagagacagggtttcaccatgttggccaggctggtctcgaacccctgacctcaagtgatccacctgcctcagcctcccaaagtgctgggattacaggcgtgagccaaggcgcgcggccagaaagcagaatgttaagaggtgttgtccatgtgacgaaataagaaaataggagttatattaattgaatttatgaggagaaatgagagaactgcaaataagcatataaatgtcaaacaattggaggtggagagagcagagattgcaagtagactacagggaatggtccatttgcccagacattcatcctagtctgttcacgctgtgctatagtttggacatggtttctttgactcctccaaatctcaggctgaaatgtaatccccagtgttggagggatgctaatggaagttgtttgggttatgggtaggatctctcatgaatggcttggtgttgtcctagtgattgataatgagggcgttcttgctctattagttccctggttgttaaaaacagcctgtgaacctccccctctcttggttcatttctctccatatgatctctgcacacaccagctcccctttgccctctgccatgaatggaagcagcctgaagacctcaccagaaacagttactggtgccatgcttctcgggcagcctgcagaaccatgagccaaaataaacccagctccgagtattcttttacagcaacacagacagactaagacaggctgctataacaaaatatcataaactgggtggcttctaaacaatagaaatttatttctcacagttctggaggctgagaagtccaagatcaagatgcttgcagattcggtgtgtggtgagggtctctttctggttcatagacagcaccttcttgctatatcttcacatggtgaaaggtcaagaggtctcactcaggcctcttttataaagccactgatcccattatcacctcccaaaagcctcaccttctaataccatcaccttggaggctaggatttcaacatatgaattttaaggagacacaaacattcagaccgtggcactgttgtttatatttagggagaaaatgattaaaagaggtgatctccagggagtggtactgaagttggaaaataatgtggtctttatttatttatttatttatttttgagacagtctcactctcttgcccaggctggagtgcagtggcacgatctcagctcactgcaacctccacctcccaggctcaagcgattttcctgcctcagcctccccaggagctgggcttacaggaatgcaccaccacacccagctaattttgtatttttagtagagacgaggtttcgacatgttggtcaggctggtctcaaactcctgacctctgcctcggcctcccaaagtgctgggattatgggagtgagctaccgcgcctgacctcaaatagtgtagtctgaggtcatacatataagcttttacattgggcaaattgccaggcgcactggctcacacctgtaatcccagcgctttgggaggccaaggccggcggatcacctgaggtcaggagttcgagaccagcctaaccaacatggtgaaacccatctttattaaaaatacaaaaattagctgggtgtggtggcaggcgcctgtaattccagctactcggaaggctgaggcaggagaattgcttgaatccaggaggtgaagattgcagtgggccaagaccatgccattgcactccagactgggtgacagagcaagattccatctcaaaaaaaaattgccattgcttaactcccctgaacttcagcctcctcttctataaggtgggaaggtagggtgacactctccacttcctggacttgtctgaggattaagtgaaattatgcatggctagagtttggcagagcagctggcacatggctagatgtactggctagagggacaaggcccaaactgacgttaggtccagatccaagtcccgatggaagagcagagacctcagattcttggagaccatccaacctactgctttctcggccatcgagcacatggggcccagtcttatccacagcaacacaatgaatcagtctgcaaacccaggactagaactggctcctgacacccagccctgctggacacccctgccacctctgaatcatcgactacatttggctttggacatggagaaaagggagcaatttgggaagaatgaaaacatttcctcctgtgcaaattgtttctttttgtgctggcaagtccaaggtgttctgacaaaggtcaaaagtatttattttcttgaatatcatgggagtgagaatgtgacacagatgagggggagtgagggggaggaaaggaggggggggagggctgttgccaacttcaatagctgaaagggcttctttttattacaggaagtgtttggtttgggggcacagaaacaacctctagttttctatcaaaaggagcagaaattacaattaggaaaatcacagtttataaacagactgacaattctgtcaaggctgtgctccatgctgccctgcccgcctccccagctcagatccggttcctcacccccatctgagctttgccagcccactgggtcctgacccactgcactcccctatgctgttcctctgactacactgcccgaccccagtgccaactcaggcactgttcttgacctacctgagtcctcctctaggcctcctcctcaaaaaccctccagctcttcttctgtgtacatcacaccacatctttctgtctttgcacttaccaagctgcatctcaattgcccctacacccatctgtccctcccagtggactgcagaacatatactggaccctcagactcaggtctggcattcagacagaatcctgctttttttggcctgctccatttggggccacatggtgtttttgagctgtttgcgttcatctccagaaactaaaaattaagagatttcacattaaaatccagatttttggcttctctcaataaactggaaatccagcaacatgggtccagccctcccagcagcggtcccttttggatacccatgccttttctgtttcttcacagtccctaccacgccctactgtctccctgacattaaagccttatgtcaggaaccatttgtcattattcttgcaaaatatttctttcttacagtggattaataagaaagtgaagtatttcttttactcatgttccttcctcacacctggctcacttcccttgtttatgttaccagactggaacccataagtacctgggctttcaacccttgcaccaggctgaaaacttcttgaaaacatatacaggctaagtgtagtggctcacacctataatcccagaacttagaaagactgaggtggaagatcacttgagcccaggagttcgacaccaccctgggcaacatagtgagacctcatctctactaaaaataaaaaaaataaataaaaaaaattagctgggcatggcacccacctgtggtcccagctacctgggagggtgaggtaggaggattgcttgagtaagggaggttgaggttgcagtgagtcatgatcgctcctctgcatccagcctgggtgatacagccagaccctgtatcaaaaaaaaaaaaaaaatgaaaaaagatacagtgcttcgtaacatctctgtagctccaacagccagcacagtgcatagctcagagtaggtctctcgtaatgaatataactcttgctactagaagaagagagcctctttataaattctttcatcttcttcatcatccattctaaggcaggaaattaaagaaagaaagaaaaataaaattaaaaagagaaataagctttcctgtattaggctgacttgtcccagaggcagcaacgggcatagcccagacccagggaaagtcttgataatactatctaagaaggcaggacacaaaggaatgtgctctggagactctcccagcactccctcaacacagggagaagaaaaacaaattttcctttgttttatggtatgagtttatagattcttgttctctgtaactggtgacttaaagtattctgttttatctaagcagtggtgtgaaggtcacaagctgtctgagcaggccacctgggcccatagtgcaggccatggaataagccatgctaggcactaggcaaacctagataatggacatctgggttgcatagcaacggtcatgtgtaaccctgagttatgaacctgttacaatttgattaactgtctttgtcctgcctctgtatccctgctttcacactgctgtaagcctgcttcaagttagcccacccctttttaaagtgtgcataaaagccaagtgctgtctttgttcttggcccagtctttggatgttaagtcggctgggtctgagtgcactcaataaagatatcctcctgcatacactccaaggtctccctctggtccttctgattccacaacaattcaacaacgattttctgagttcacctataagcctattttccttcctcagtgttctttctctttgatgtcctggtacctcttgtaaaccctaaatactcaaaacccctccttagattgcccttttacgtacctcttgcaaaactttgatgttagcaattacataagagaagatcataaaaaccattaattagtagtgagagtattaatgtcagtaataagtagatattaatgttatttactgagagtttcccatgtatatcagtttgttctcacaatgctaataaagacatgccagagtctggataatttataaagggaagaggtttaattgactcacagttccacatggctagggaggcctcacaatcatggcagaaggtaaatgaggagcagcaaagtcacgtcttacatggtagcaggcaagagggcatgtgcagggaactcccctttataaaaccatcagatctcatgagacttattcactatcatgagaacagcatggaaaaaacccacccgcatgattcaattacttcccactgggtccctcccacaacatgtgggaattacgggagctacaattcaagatgagatttgggtggggacacagccaagccatatcaccatgtaccaagaactttacatagatttcctcactccagctttacaaccctgtgtatcattagtcttcatattagtcaggactgtaagttgcaagtagaaaaaaagtaacaaccaactctcaaatggtttaagccaaaaggttcatataactgaaaaatcagatctagtattcatgaaatcattatgtggatgacataattctaagaattttacatgtattaattcttttaatcctgtgaataatattttaagaaaggtactaatataatttccattttgcagacagggaaacttgagtactgagagttcacaattttacatctgaacccactttctgtgtgtaagggaattacctacttcattcaactccttggaacccagagttcaattctgcagaggaagcagaaaatgccatgtcctccctgcatggaggacatcagtgttgtgacttaggcgttgcccatcaggtgcatctgccatggacttcgattttcaaactcatatagagactgttctctggcaggtgtgatgagagagtaagatccagttccagagatgacaatccagtggggttacgggcagcactggctgtctggaaccagagggccagtagtgtccccaggccaattctgttgatgtgaatggagacaccatgcctggcttctcaacctctgagtttggttcccctgtgattctataatctactccatatgcattcaacaaaactcgtgtgagtcaatattccataataaactcccttacatatatacatctatcctattagttctgtccctctagagaaccctaatacactatctcataaaataaattaaaaattaaagaggaagaaactgaggatcaaagaagttaagtaatttctttagagtcccacagccacggaatagagaagttagaatttgaatggctcaaattttgttttacttttgttatttttttgttattgcttttctcatttggcttgcaataatgttcttaattttgctttttcccactttcctgatttaaatgctccctataaaaatttaaatatataaagttataaggaagaaagtaacattctttgaaatctcatcagcatataataactactgttaatattttactgggcatctttcatgcctgtcttaacgcgtatgggcaatagaagtaacctttttcataaatcataacaaataatacacattcttttaatcaagagcaccctttttaagtgtgatttttttttcttatctatccttttcttcttccttttctgacctccattaatctcccttacttactccacactttctggctcacgataacccctgttaacaactgatgtgtacacttgcagaattttctccaagccaatataattatacatttctttatagaagtcctgtttttaactcttgcaatattcatattaaaggacactaatgggctgtgcgcagtggctcgtgcctgtaatctcagcactttgggaggccgagacgggaggatcatttgaggtcaggagttcgagaccagtctggccaacatggtgaagtctcatctctacaaaaatatataaaacttagcctggcacggtggcatgcacctgtggtcccagctgctcaggaggctgatgctggagaattgattgaacccaggaggcagaggttgcagtgagcccagatcgcgccactgcactccagtctagatgacagagtgggaccctgcctcaaaaaaaaaaaaaaaaagaaaagaaaagaaaagaaaagaaaagaaaagaaataaaggacaccagtggtggcatttggggcaccagacagtaactgttgaaagagatttcagccatagaaggagcccttcttgacacccctaaaattgcactgctgaggtgattgtcacgtgagctcaccccgtcacagttctggagtgagcgtgagaaggctgagggtgagcacctctgtccccaccaaagaaatggatcgccaggccctggtctcgtggtttccaggtttgcttgcaggcctgcctgcgaagctcaaggaactgcagagtcacttctgtctggagctcctgaatgcagtccagctaaccttccctacccggaagcccttcaacatcttttctccattccctttacgggttttattcttcttttgcctgctcagcaattttcaccagtccaaggaccgaatgctctgctctcagatcaatagcccttgggaagtactgcagacagtctctgagatgcaccctagctgctcctgcaaaggaattgctttctttctgactcagtttcacttgaattaagcttcttctgctttatgaaagcagcctccttccagagcacaagttgacatcaacccagaaccagaaagaaatcagtggctggaacttgtcttattcatctctggaaagtccagctctccagcagaggcttagaattctatttccttttttgtttcttagtcattgcgcttgagaaggcatttaaagatgctctttggctagagtaagtgctcagtaagcatttgttggcgaagggataaaacagtaaagatggaataatcagcatttggtaaatggttggtgaaggagaatcaaatgagataacacatgtgaaattgatatgtaatctgtgaatagtgaaaattgttcctggccaggcgtagtggctcacacctgtaatcccagcactttgggaggccgaggtaggcggatcacttgaggccaggagttcaagaccagcctggccaacatggtgaaccccccccctattaaaaatacaaaaatgagccaggcgtggtggcacatgactgtaatcccagctacttggggggctgaggcaggagaatccctcaaacctgggagacggaggttgcagtgagccgagatcgtgccattgcactccagcctgggcgacagagcgagactccatctcaaaaaaaaagaaaaagaaaaagaaaaagaaaaagaaaaccaaagggactcgtccgcagcgttatctgctggcgccatcttccggaaataagttagcacaacaggtctatttctgtttcagcggggcgtgagggcactggaaatgcaggcaaggaggggaaaagagagaatgaattttagcaaaatctctccatctcctctgtcctggatcatctaattactctaccaagattatcattttaatgtaatagtactactaacatgctagcacttgttttgagcacctagtacgtaccagatactgtgctcagtgttttacatgtgttatttcatcctcacagtaactgcaagaagtgtatatagtaagtcctcacttaacttcttcgatgggttcttggaaactgcgactttaagcaaaatgatgtgcagcacgtcctcaagtaatgtccttccattatgattatgagggaaaaaatggtttcatcatacatcatttcacttaaagttgcagtttccaagaaactatcaacattcagttgatattaaaaacccgaggcatacaaggtgtatagtggacttatcatctctaggattacatatctagttggtgtttgggataagactgaaacccagttctgtctgacttcagagcctgtggtgggctgttgtgagtcaggtcccgaggaatcagactccaatatggagatttgaagtcaggaagtctattgcagagtgctgtcgggattacatctgtggaaaggaaaagtcaaactgcagtgcaacctcagcagaggccttggctaatgccatggggaatatagagctgggatggcaagaggacaggaccttggaatgtccacctcgaacagtcatagggactcagctgagagctgccagcagccaatgctcccagcagctgggggaataaatgccccatcctggggatgggggtctgggtggcacaccacagtatgcactgcagcgcccactacctattccccatgcattgctcctcaaataagggagatggctgggagggagacaacatcagtgatggggtagtggaggaggaattcagagagtaaaaatggttttgtctgtcttccatccacctgtgacctaggctatgcatgccatccagctgcaataaccaatacatttgggtcattcatgttgatataatgtatggattattttatgggttgcaagccattaacaaataaataaaatgcaatattccactggctgattggagatgcattctttgacattctcaaataagaaatggaagaattggccaggcacagtggctcacgcctgtaatcctaaccctttgggagtccaaggctgggggatcacttgaggtcaggtgtttgaaaccagcctggccaacatgatgaaaccccatgtctactaaaaatacaaaaaaaaaaaagccaggcgtggtggtgggcgcctgtaatcccagctacttgggaggctgaggcaggagaatcacttgaacccaggagtcggaggttgcagtgagccgagatcatgccactacactccagcctgggcgatagagtgagattccatctgaaaaataaaaataaaaataaaataaaaaggagatggtgccttctgccctggggttaaaaaaattaaaaaattaaattaaaaagagatggatctatttgtataatatggaaagacctctaagacatatttttgcatgaagaaataagattcagtaccctaataaactatataaaaattatatctatttctagagttttacatacactataaaaggatggaattttaccgacttgccctatggaaggattctacatccccaccccacgtaagtcaggcatagccatatgatttgctttggccaagggaatttgagtggaagtgacatgtgagacatccaagcagaagctttaagaggctcccccattctctcttttccttattccatgagatcagcatgttccagctgcttcttccagctgtgtccagagatacagctgaattcaacccatcacaaacatgcaattaagatataaatttttaggctgggcgcagtggctcacgcctgtaatcccagcactctgggaggctgaggcagatggattgcttgagctggggagttcgagaccagcctgagcaacatggtaaaaccctgtctccacaaaaaccacaaaaaattagctgggccttgtggcacacatctgtagtcccagctacttgggaggctgagatgagaggatcacctgagcccaggaggtcgaggctacggtgagccatgatcatgccactgcactacagcctgggagacagagtgagaccctgtctcaacaaaaaaacaaacaaacaaaagacataaacttttattaatataagacactgagactttgaggatgttgttattgtaggttattgtagcataacctaacctaccatcactgataatacatgttgctatatataactgatatgtggttacttctggggaggagaaatggcattgggaggtggcgatcatagggaattttagtttttaatctttaatattttagttttcttacaataaaaatatatccacacattactatgtaataaatatacattattttaaaatgaatacagcaggtatttccctacttaaaattaaatgccaaaaaatatcttttttttttagaccgagtctcgctctgttgcccaggctggagtgcaatggcataatctcggctcactgcaacctccgcctcccgggttcaagccattctcctgcctcagcctcctgactagctgggattacaggcgctggccaccatgcccagctaatttttgtatttttagtagagacggggtttcaccatgttggacaggctgatctcaaactcctgacctcagatgatccacccacctcggcctcccaaagcgctgggattacagacatgagccactgaggagctctatttctgattaaacctatagacctctctgagttaggatctcagcccttgttccattaaaatgaaaagccaaaattggttgcatgtatagcaaagaccttgaaatatcatagactgccttgcaatttcaacttctcattcaagccaaacaacagccctctttatctttgaagtttacttttgagcaaaatcaaagtggctagactccctgatccactgcctagtccccagcttcatgtgtgtcagatagttacagtgaccagagcaagagtagcagcagcacctctggcctctcaatcacatctatggtgactttgaaacaaaagcctcctggacttctgcaactcctgctcttctcatgaatttgtaaccacctaattccctatagtcaatccctttctgcctacaatacctagagtggtttctgttcctatctcctgcacagaggcatgacttagtacaggttggaagataatattcagaaaagagacacaaagacaaaaagatgaaaaattggaaagaaaaagaaaaaaaaacagtaaaattagaaagccatttcaagaggtcaaacacctgaaaaattagagttctggaaagtgaagatatagaaaatggggagaggaaggaagaaaatattcaaagaaataattcatgaaaattattccagaactgaagaaagtatattttcagattgggagagatcattgaggaacaattagatgttatgtgcctcctgagatgacgccatagaaaatacaagtcctgtctataaaatatgattgccaaaaactgaactgaaatctaatcaggcctctagattgaactaccagtttacaggacattggagggatggtgtcacattttaaaacaacatgaagggccgtgcgcggtggctcacgtctgtaatcctagcactttgggaggccaaggcaggcagattatctgacctcgggagttcgagaccagcctgggcaatgtggcaaaaccccttctctactaaaagtacaaaaattagccgggtgtggtggcacatgcctgtagtcccatctacccaggaggctgaggcaggagaatcacttgagcccaggaggcggaggttacagtaagctgagatcgctgcactgcactccagcctgggcgacagagcaagactccatctcaaaaaaaaaaaaaaaaagaaagaaagaaagaaagaaatgaaatctgagcaataacttccatgagcttgaaggtagattcagctccatgacctccagaaaggaatgcagcccagctgacaacttaatttttgctttgtgagactctaagtggcggatcccagcagacacacactatactcagtcttcttacctacagaattgtgagataagaagtgggttctgtttaagctactaaatttgtagtaatttgttacagcagcaatagagaacaatcattagcaaccagaatatagaaaacttggcaaacaaacaagaaacaaaaactttgttaatattagggaaaacaagaagttctataataaagggaaagccatcatggaatacagctgggcaaggctgacaatagtgtatttatggtcacaaaactgtaaacactgaatacaaatttaactaaaattatgatataatcattttgacatgatgcatgggggcctggagcagtggctcacgcctataatcccagcactttaggaggctgggcaggtggatcacttgagcccagtagttcaagaccagcctgggcaacatggtgaaaccccgttactacaaaaattagctggacacagtggtgcacacgtgtagtcccagttacaggggcactgaggtgggaggattgattgagaccaggaggttgaggctgcatgagctgagatcatgccacactgcacttcagcataggtgacagagaccctgtctcaaaaacaaaaacaaaaaaaaaaaaaaaggaaaagaaagaaaaaaaggatgcatagggagggacagaacatgacatttacctgtgggatttggaggatttggagaagatgctgcatagggtgtatgagaaagagacagtctttatattccataaaaattacccaatagatattgctaaaagtaagaaaattagggaattacaaattaagtgcataattttggtagcaaaaggtggttgctcatagaagcaggatatagggaaaggtgttaaagacttttaaggccgggcgcggtggctcacacctgtaatcccagcactttgggaggccaaggtgggcagatcatctgaggtcaggagttcgagaccagcctgaccaacatggagaaaccccgtctctactaaaaatacaaaattagccaggcatgatggcgggtgcctgtaatcccagctactcaggaggctgaggcagaagaatcacttgaacccgggaggcggaggttgcagtgagccgagatcacaccattgcactccagcctgggcaaaaagagcaaaactccgtcacgaaaaaaaaaaaaagagacttttaaaacacacacatatagcaggtcttgaagaactattttcctctatcaactattcaactacgtgcaggtttagtcttaagtaagaataaaatctaattttaaagcaattgttaactccaggggaaaaaaattccaagtaatatataaacaaattgaaagaatgctgcagtggtatatgtgtaaagtgattttagagagcaaaattgattggtccatagtaggaagtcaacagaaacttatccaaaattgagaatttaagaaggaattgtggggtttttttttcttttttttttttttgagacaagagttttgctcttgtggcccaggctggagtgccatggcatgaccttggctcacagcaacctctgcctcctgggttcaagcggttttcctgcctcagcctcctgtagtcccaactgtcattttttttttaagaaataaacaaagaaacagctgtttatgttatttagaaatatggaggcacatagcagaaggaacagctaaatgagttgaaatcaccacctcttgggagaggttagcaaaaggatgatgggtgcgggagtgccctttttcataatgaaaacaaaattatctggcttttgaaattatgcatagtgttacctagacaaaaataagaatttacattgcattgctctgagatgttcttgattttataagatgttttgtgtatatatatatatatatagtttcatgtatttctaaggatgtgggtgggaggagggatgctgccaattaaaccatgacatgccactgatggtaaaacacatgatttcagatatgttaaaatatgagaatatgtatatctttgaatctgtgaaatacagtacttttttaaaatagatttttttttttgaggcaaggtcttggtctgtcacccaggctagagtgcagtggcatgatccatagcccactgcgacctcaaactcttaggctcaagtgatcctcagaaaattgaggtcatagggtacacggccagcctgaaaactagacaggacaatacacagaatcacagtttaccaggagcagaagcagctggaaacaataactggtgggaacatttaaacagtaattatgaattgctggaggctgactgtggactagcttgagggtttaaaaaacccaggtgcccgttcttggggggctagggggcagaggtatatttttgtgagtttggcctcccagagtcccaccagtttctcacagtgaagatctgaacaaaatcccctcacactttggacaggagtagggtaaataaaccatgtggaaataagcccagagtgctctgttctctgtagcaaaggcctgccctcaatggatactactttaccagcatcttactagcctagaggaagggcaattagacaactacagcctcctttagctttcccatctcatgtagggggagaaaaaaaaagcaaagaaattcttctggaggttatagcccagggactcgggcccgttaaaaaaaaaaccaaaagctgggagtggtggctcacgcctgtaatcccaacactttgggaggacaaggcaggcagatcacaaggtcaagagatcgagaccatcctggccaacatggtgaaaccccatctctactaaaaatacaaaaattagctggacatggtggcatgtgcctacagtcccagctagtcggaaggctgaggcaggagaatcacttgaacccgggaggtggaagttgcagtgagctgagatcgtgccactgcactccagcctggcaacagagcgagactccgtctcaaaataaataaataaataaataaataaataaccaaaaatggagatttaattataagtttaagctttcccctcaccaatacctcaccagcacagcaacagagctccatgtaaaaacagtggattacaactgaaagagctgcaagacacaaaccagaattaccaagtttccagagaaactgcaagacaccaagggagacaaaaacaagaacatttgaggaaattgaagtctctgacacttacagctacagcaaacagtaaacacaacctaactcctagacagacaaaaaaaccactaaagcccaatttacctccgttactattacctgatacatcatgcctgactgtcaacaaaatttatgacacattaacagcaagaaaaaacacagtatgaagagacaaagccagtggcagaaattttggaattattggatcagaaatttaaaattactgtgattagtgtgctaaggtctctaatggaaaaagtagacaacaggccgggtgcagtggctcacgcctgtaatcccagcactttgggaggctgaggcgggtggatcacctgaagtcaggagtttgagaccagcctggcctacatggtgaaaccccatctctactaaaaatacaaaattagccaggcatagctctattaattttagccaaagcggacttcagaataagggaaatgtcagggataaagatgagcattacataatgattaagggtgagatctccatgaagacccaacaatccttaatgagtacgtgccttacaacaacagaccatcaaaatatgtcaggcaaaacatacagaactgcaaggagaaatagggaaatccattattattattattattattattattattattattattatctttgagacagagtctggctctgtcgcccaggctggagtgcagtggcgcgaactcggctcactgcaagctccacctccccaggttcatgccattctcctgtctcagcctccagagtagctgggactacaggtgcccgccaccatgcctggctaatttttgtatttttagtagagatggggtttcaccgtgttagccaggatggtctcgatctcctgaccttgtgatctccccacctcggcctcccagagtgccgggattacaggcacgagccaccgcacccagccaggcaaatccattattatagttgaagacttcaacatacctctagcactaattgacaaatccagtaggcagaaaaaagtagtgagaatatagatgtgcagtaccatgaatcaactggatctaattgacatttatagactagtttatccccaaacagcagaatacacattcttctcaagctcctatgaaacattaaccaagatagactacattttggaccataaaacatatcttaacaaatgtaaaagactagcaatcatacaaagtataacaccagagaattaaactagaaataagagaaagctggaaaatcctaaaattttggaaatgaaatgctagtaaataacacattggccacagaagtctcaagataagttaaaaaatattttgaattaaatgaaaatcaaaatttgggggatgtaaggaaagcagttcttagaggcaaatgtattgcaatgaatgtgtgcattaaaaaagaagaaagacctaatatcattaatctaaacttccaccttaggaacccaagaaaggagagcagtataaacctaaaacaagcagaagaaaagaaaaagaaataaaaattcaaacagaaatcagtgaaactaaaaactagaaaataataggaaaaattgagaagaccacaagctggttctttgaaagatcagtgaagttgataaatctttggccaggctaatgaagaaataaggaaagaagatataaattaattaatataaataaaagaaaggccaaggccgggtgcagtagctcatgcctgtaatcccaggactttgggaggccgaggcaggtggatcatgaggtcaggagatcaagaccatcctggccaacatggtgaaaccccatctctaaaaatacacaaattagccaggtgtggtggcgcatgcctgtagtcccagctacttgggaggctgaggcaggagaattgcttgaacctgggaggcgaaggttgcagtgagccaagattgtgccactgcactccagcctggcgacagagcgagactccatctaaaaaaaaaaaagccatcactactgatctcatgaacattaaaaggataaaaaggaaatagaaataattctgtggccacaaatttaacaccatggataaaatggatcaattccttgaaagatacaaattaccaaaattcacaagaggagaaaaatataatctgaataggcctagacctattaaagaaagtgaatcaatatgcaataaactttcacaatagaaaacgccagacaaagatggtttcactgggcgaattatacaaaatttttaagaaataaatgataccaattatctgaagataaaagcagagtgaatgttttctatcccacttcaggaaaccagcattaccctgataccaaatctacgcaaagacattgcaagaaaggaaaattagagaccagtttctgtcatgaacgcagatacaaaaatcctcaacaaattattggcaaatcaaatccaagaatgtataaaataaactgtgcaccatgatgaagtgggatttgttccgggtataaaaaggctagtttaatatttcaaaatcaatgagtataatctattacaacaacagaccaaaggaaaaaaatcatgtgatcacatcgacaaatgcagaacaagcatctgacaaaatctaacacccattcattataaaaactctccgcaaactaggaatagaaagataactttttaaacttcataaaaaatatctacaaaaacactgcaatgaacagcattctcaatggtaagaaattagatgctttctcctaagatgtagaacaaggcaagcctgtcccttttcaccactccaattcaatattgtacaaaagtcctagctaatataataagataagaaaataaaataaaaggtatacagattcagaaggaagaaacaaaaccatctttgttcacagacatgattatctatatgaaaaatccccaaaacttggcaaaaactcctggaactagtaagaaataatagcaaggttgtaggataaaaggttattacacaaagtgaattgctttcctacataccagcaattaacttgcgggatttgaaatttaaaacacaatgccatttacattagcacaaaaataagtataaatctaacaaaatatgtacaagtctatgtgagcaaaactatcaaactctggtggaagaaactaaagaaaacctaaataaatggatagatattccatgttcatggataaaagactcaatactgttaatatatcagttcttccctatttaatctatagattcaacacgatcccaataaaaatcccaatgagtaattttgtggatgtcgacacatttattctaaaatgtatacagaaatgcaaaagaaccagaacaaccaacaaaatgctgaggaagaacaaagttggaggactgacactacctcacttcaagacttacaacaaaactatagtaatcaaggcagtgtggtcttggcaaaagaacagacaaataaatcaatggaacagaatagagaatttagaaatagacccacacaaatagtgaactgatctttaaaaagaagcaaaagcaatgcaatggagaaaggatagccttttcaacaaatggtggtggaacaacaggacgtccgcacacacaaaaatgaatgtagatactgataactttcacaaaatttaactcaaaaaggcaaaactacaaaacttctaaatgataacatagaagaaaatttaggggaccttgggtttggcaatgaatgtttagatatgagaaagaaaagactctttttatctgaagaatgtgagctcctttatcaggcccagagaggcattgaaatgtgacagcactcatgtctcctcccacctggaggtaagtaatcatttcaaagatgcctgttaaatgaattatagactgactattgccaccaagagctatgaattaacctaaaacaccccatgctgaacaccataatgcatgctctatagtacagctctatagttcaacaatgtatatagccaatcactaatcaatgttatctctgtaaaccaatgacaattcattaaaaacaacttttgtaatcaccctctctccctttttttttttttttttttggagacagaatcttactctgtcgcccgggctggagtgcaatggcgtgatctcggctcacggcaacctccacctcctgggttcaagtgattctcctgcctcagcctcccaaggagctgggattataggtgcataccaccacacccatctaatttttgtatttttagtagagatagggtttcaccatgttggccaggctggtctcgaactcctgacctcaggtgatctgccctccttggcctcccaaagtgctgggattacaggttgagccactgtgcctggctgcatcacgctctctcctaatttgttcttttttctttaaaaacttgagcctctcttttgttctgtggggcacttcctattgcttccctggctgcagtcctcaactttggtccaaataaactctatattaattttgcctgagtttctttctttagctcaacaggtataacataaaaaacatgatccatgaaagaaaaattggtaagttagacttcatcaaaattagtgcaaagtcactgtcgagaggataaaagacaagctacagacaagaagaaaaaatctttgcaaagcacatatcacctaaaggacgagtatgcaaaatatacaaagaattcttaaaattcagtgataaaaaagcaaataatccaattaaaatgagtgaaaaaatctgaacatacacctaaccaaggaaaatatacaggtggcaaataagcacatgaaaagatgctcaacattgtatgtcatgagggaattgcaaactagaacaatgagataccattacacacctattcaactggttaaattcagaaaaacaaaaacacaaacaacaagaaaaaactctcactatatcagatgctggcatgagtatggagcaaccggagctgttactgttggtggaaatacaaaatagtacagctcctttggaaaacaatttggtagtttctttatctttctttttttttattttatttatttatttatttatttatttatttatttatttatttatgagatagagtctcactctgtttgttgtccaggctggagtgcagtggcacgatcttggctcactgtaacctttgcctcccaggttcaagcaattctcctgcctcagactgccaaatagctgggattacaggcacccgccaccaagcgtggctaatttttgtattttttttgttttttgtttgtttgtttgtttttttagtagagacagggtttcatttactatgttggccaggcttgtcttgaactcctgatctcaggtgatccaccgatctcggcctcctgaagtgctgggattacaggcatgaaccactgtgcctggcctttttttttttttttctctgagatggagtctcactctgtcgccaggctggagtgcagtggcacattcttggctcacttcaacctctgcctcccgggttcgagtgattctcttgcctcagcctcccaagtagctgggactacaggcatgcgccaccacaccccgcaaatttttgtatttttagtagagatggggtttcaccatgttggccaggatgttctcgatcttttgacctcgtgatccacctgcctcggcctcccaaagtgctgggattacaggcgtgagccaccgtgcccggcagcctatttttatttttaatgtttttttagggatggggtcttgctgtgttgcccaggctggagtacagtggctattcacaggcaccatcccactactgatcagcacgggagttttgacctgctctgtttccaaccttggccagtttaccccttcttaggcaatctggtggttccctgctcccgggaggtcatcatattgatgctgaacttagcgcagacgcccaggcaacatagtgcactgcagcccagaactcctggcctcaagcgatcctcctgcctcagcctcctgagtagctgggactacaggcacgcgccaccacacctggccagtttactagtttctaacaaagctaaacattgtcttaacgtataatctaacagtcacactcttaggtatttactcaaacaagttgaaaacttatgcccaaacaaaaacctgcacacagatgtttatcatggttttcttcataattgtcaacagctggatcaagatagctctcagtaggtctattagttccctaagcctgccataacaaagggccacaaactgggtggcttaaaaccacaaaaacatattctctcaccattctggaggctagaagtctaaaatcagtgtgacagcagagtcttgctccctttgagactctgggtagaatccttccatgcctcttcctggcttctggtgctgcccagcaatccttagtgttccctggctcacagctcatcactccagtctcggcctccattgtcatgtgttgtttcccatgtgtgtcctgtcttcagatggcattttcctccttctttagggcaccagccacgttggattaggacccactcgaatgacctcattttaattgattatactgcaaaagcccttttccaaataaggtcacatacacagattccaagggtgaaagcttcagcatatctttctggaggatacaagtcaatccttaagaataggttaatgggccaggtgtggtggctcacacccgtaatcccagcactttgggaggccgagacaggcagatcacctaaggtcaggagtttgagaccagcctggccaacatggcaaaaccctgtctctattaaaaataaaaaattagctaggcatggtggcacacaccaataatctcagctacttgagaggctgaggcaagactcacttgaacctgggaggcggaggttgcagtgagctgagatcatgccactgcactccagcctgagcaacagagtgagactctctctggaaaaaaaaaaagaataagttcatgcataaacacaatatggtagattcatacaaggggattttttaagcaatcaaaagaaataagttatcaaatcataaaaagacatgaaggaaacttaaatcacattacttaataaaacaatccagtcagaaaaggcgacatatgtgctgggtacaatggctcacactttattacccagcactttaggaggccaaggcaagaggattgcttgagcctgggtgttcaagaccagcctgggcaacatggcaaaaccccatctctataaaaaatacaaaaattagctgggtgtggtggcacacgcctgtagtcccagctactagggaggctgaggtgggagaatcacttgaacccaggaggtcgaggctgcagtgagctgtgattgcactactgcactccagcctgggtgacagagtgacaccctgtcaaaaaaaaaaaaaaagaaggaaggaaagaaagaaagaaagaaagaaagaaagcgagcaacatattgtatgatgtaactatatgacattctagaaaaggtaaaactatagtgtaaaaggtctgcggttgccaaaggttggggtgaggggagggagtgagggatgaagagttgaagcaaagatttttaggacagtaaaacttttatttatatacatgacattatgcatgtgtcaaaacctatagaactatgtacaacataaagaatgaaccccaatgtaaactacggactttagttaataatgatgtattaatactggctcatcaattgcaacaaatgtaccactctaatacaagatgttaataataggggaaattgtgtggaggagggagagggaatgtgggaactctgtaatatctggtcaatttttctgtaaacctaaaactgttctaaaaaattaagtctattggccaggcacagtggctcacacctgtaatcccagcactttgggaggccatggcaggagaatcacttgaggccaggagtttgagcccagcctgggcaacataatgagactctgtctctacaaaaacatttttaaaaattaagtctataatttgaaaaaagattcactgcagtatataaggctctagtatcacttctttaaggaaatctttcctgctctcccatcatattcccaagatgggttaggtgctcttctcccaagctcccataataccctgcacatatatttatttctatggttgcacctaccacattgtattttaacatttatctgtatcgctgtcagttcatagctgtggtttgctgacgcttggcctagaatgcagagatggtgaaataagctaatccattgaaccctttaacaggcacctaggaatgcctgacaaagggcacttctgttccctcaatgcactgttgatgtcatttgtggtataatcattattagccctctggtccattaggctattttctggatgacggcataaggcacagtcttgtgacattaaaagttacttagcctgagtagtctctagattactggtctagggtctgccaaagacgatcctcatggggaagtttttgcactaacctctccaggattcaaatccaatggttttgacccaaaaccatgctgtttacgttacacaacacgttctcaatcttgttcaacttaaaaggtggcacagtacaggggtcactggcacacatgcctacatgacagataacataagtgacaaaagcagactcaggtcgagaagggtccctggcatttgggaaagtccatgcccagtctagaacaggcagccactccttggcttcagccaattgttgccacacagaaatgtggacacagtgttaccagacaaggcagagaggcagatttctgttcacacagaaacttttcagtttaaaaaagtgttggcaactaagtcaaactgcttagaaatactggagatggcatattgggagggtaaggaatcatccaattgaattggggtatttacgatgggggagaaatagcagctaaaggataagggcagcttttggagaaccctgattgtcacactcaaggaacttatatattgtcatctaggtctgagtgcacactaaataatttaagcaagaacaggacacgattagaatggtatttttaaaagatcacttggcagttgacgggcgaggctgagaccaaatggtgaattagaagtctgtcatttagctaagtaagggtaaaggcaagacggcaaaggcctatttacttggctttttctcctacccgactgcaaactccaagacagcagggccccacctgccttgttcattgctgtgtctccagcactaagcaaaaagcctgttcaacatttgttgaaagaataaatgaacaggagagagggaaggcgagaggcattttgaaggactgagtttaaaaatcaactaccttgaagccggtcgaggtggttcatgtctgtaatcccagcactttgggaggctgaggcgggtggatcacctgaggtcaggagtttgagaccagcccggccaatatggcgaagccccgtgtctactaaaaatacaaaaactagccgagagtggtggcatgcacctgttatcccagctactcaggaggctgaggcaggagaattgcttgaacctgggaggcagagattgcagtgagccaagattgtgacactgcctgggcgacagaaagagactctgtctcaaaaacagaaaacaaaacaaaacaaaacaaaacaaaatcaactaccttcagaggagtagaatgttggtaattgtgagagcagtcatggaggggaggggagccatggaggcctgtttccttccctgaacttcctcaacgagggggcatcttaaagaagaaatcatgtacacagatttttgtgggttttttttggagacagggtctcactctgtctcccaggttggagtgcagtggcatgaccatagctcactgcagcctacaactcccggcctcaagcaatcctctcacctcagcttcccaaagtgctgagattacaggcgcgaaccactgcgctcgaccctacacaggttttttaaaaagacgtttgtgcattggattcctggcacttcacgtggcctcttcagtctaccaaagaaggaaaaggtaagtaccctgaaggattgaaaggattaaatgaacattgagggatgagcaatttctgttcttccctggctccagcattaccaaagcacacagtaagaggactgacatcggcctccgacccagtgaggattactttcggggtggagggggaactgctaaacctcgaatctccgggactggccctggcgcgtttccagtcccagcagaaagggcaatccccatccagaccacactcctagtcctccttattcccacacagcccgtatcttgaccacccccagctccgccctctctcctcccacctccttttcccgctcccccgccccatttccttcttctccgcccacctcctcctgggtccctcccccggccatccgccctgccccggcccctgcaaccctgcctttcgctcttcttcctcctcccttccgtctgcgcccctcccgtggggccgtggcaaccccgtgcctcgcttgcccaatgagaacacggtttggggcggggcgcggccaggaccggagcggaagtggcgatcggagcggaagtggagctaccgccaccgccgccgccgattccggagccggggtagtcgccgccgccgccgccgctgcagccactgcaggcaccgctgccgccgcctgagtagtgggcttaggaaggaagaggtcatctcgctcggagcttcgctcggaagggtctttgttccctgcagccctcccacggtgagtgcggcgcggggtccgaccggggcccccgggggcccaaactcgaagcccctctctggctgctgcgacgacggcggcccagtgggtgggccccgtggggtagcggcgcgctgcctctttcgctccgcgcggccgccggcggcgaggccagacctcgcagcggcccctccctgtttccggggccgggccctttacctcttggagaggctcgggccgcctgaggtcctgccggccgggcggggtgcaactccgtactgtgccgtaagggacagcggagccggggatcccggaccctccctcactatctgcttcgggccccacgcgacccctccctgcgtcttggtcggcaagaacgtccccttcagccctgtcacctctgctccgtgctttctggtttccagaaattaaaatttaatcaaacgcggatgagttttctagccccagtccccgtgtttggctcctcctggatgagtaaggggtttaaccttgggagacagcagtgggggaaccccctcccattttgcagtaaaaccatttcatcatccttcactggttatggagcctggcaggacccaagattccctaggaagggaattgggtttgaatcaagaaaatctgtttgttggagccggttactgagtcaggccggatccccaggaaaaaatatcagggggtgagaatcggagtattttctcacagtatttaccgtcatttaatgccagattcttttgtgtctttaccccaaattcccccatattgtgtgttagcacgtttttcggtctgaaatttgcccggtggcttcctggtcggggggtggggagcggagggaagaagaggtgggaaggtgagtgcatctttgccgcaaatggagaactcccatataatggggttttcagaggtggcagccttggtaagcaatttgccaacctttctgtaaaatacatgtttcttgtcgttgccttcattgcatttctctttggtaaggctagatagcatcaggtcctgattttgcttgccctgtgtgggagatggaatttggcaagatgatgctatgaacataaaatcagcctcgggaaccaaaagagaaaggtgaagcacttataagaatatgaaaattgtctgcatttctcattctgtcagttcatgtgaagccagacacagatgcagtttgtagacctggacactgcagcttttgcattttcatttggaaatgtgtataagtatttgttcttggtgaatttcttcttgactgcttccagtgtaccctatttcttacttagggatatctcatttgtttgagccctcatttttcttggatccctgtccttggcaacacacggtgtgtgagtgtaaaacctgtcaatcttattggacctaagttagaaatttaagtgtggctttcaaaatggaaggctaataatcctgtagcaactgcagaattattttcctggcctgtccttccaatgagataagaaaccattcacctatcttgcagatgaagtctttatgagaaatgaggtgatttggcctagactatacacctagtttttttcaaactgaatatcctcattcatcagtagcaaatatttatggattgccagcccctggagtatgacgcctaccctgtaatcttttgtacatttcacatcttgcagtgcttgttatattgaagccattttagaattggagcgctatagatcagggaggcagcctctataaaaccaggctgagcaaattcccatgatgctggttctctaggcagagtctccagagatttgggccgctacaaaaagtgcattttgcccattcggctgtggatagagaagcaggaagagcactggacttggagtcaggtaaatttggttgaaatcttgcctgcaatattttctagctttctgaatcttcagcatgttaatctctggttcttggttttcttatttccagggttatcattaagccttttttataaactgtaaattgttaaatataagcttttggtttgttttttaatcagagttcactattaatggctttttctctccagttaacatctgatgacactaaaccctgctttgtacacatgttgctttcaaaaaatggtatattattataggactttattttgcatataggcaaatccagtctttctgaatcattttctcgtctatatagcacaaatggtaatgcagcttttgatatatttttgttgcgacaagctcaataatgaaaataagcatctgggatatagttggggttcaatagatgttattgaccatctgcatgaatatacacgtgtatagattagacatagcatatatgctattcatggacatttatatagaatccatccatttgtgatttattcaccaactgatgaggtggtatcagacaattagtctataataatagttaccacttacagtacttactgtgtgctaagctttcttttaagcactttaagcatattagctcagtcttcataacaaccaatgaaaggtaagactgttagccccattttacagatggggaaactaaggcactgagaaggataattttcccgaggtctcacacacagcgcaaggtaagtgccagaaccaggaatgaaaccaggtgatctggttctgaggaatgatattatagatttctgcatgtggtagagacagcacatgtatatgttttatgtgaacaccatttagtccttaatttttctttacaccaatcctaataaagtaaacgtttgaatgggaatattagctatttttgaagatagatacaggacaatttattgtggagcatatacccattctggcctgtagggatgataattgctagcatgcatcaggaagcaagcttgtgaacaatccagtttttctagtacttgcttcatactagggagaaagtcatcagttactttggcatagaattttaggttcttcatctaatagaatttgattgtgaccattaatttttgtttatcttacgacttcatcagtagatgttcagatttttctcattttgttggcagggaggaaatgaggaaatatatctacgtaaatagagagaaacttctaaattaaaacatcctgttgtgctacctgctctttcggtgtcaacaaactgagttttcctttaaatgctggtaccttagagaatgaactaaaatttccttgtagagatacttttaagttccttgtttctacatttttctagggaaagatgacaattcactagttaaggggcaagaaattatggttacataatagcaacctttaagctttagaatccttttgatctctatgtgaatatgatcttagcagtcatctgtattgcatgatggagaaactaacggttggagctggattctgagggaatttttctaaggggaatacttgaggaaacagactaaaagtgctttctgtctcatgatatgtgtgctgaaggccaatcatcttactgctttctcaactaaaagattttctaatagaggtgtggttatatgtatctgatacttgtaatgagatgtaaatgatcagtggcctcaagtcattcctagcagattgtaggttagttaactttttttttttttttaaattctggccagttctttattatgtaagtttttcccgtactggttagtttattttattgttttccctaaaagaaccaacaggaggttatttctgaatggccttgaccaggacaagaagattgaaggctacaataaagtagatatgagtcctgtctattattattatttgccctcagctaagagctttcctttaaaatttgtttgacattttggtaagtctttggcatgtttttatgctgtttttaactccttgattttgtttttatttttaaagctagataacattagcttaataggccagttttaaaatttcactgtaacaaccttgtatagttcttttaaaagttgacaattctctcttttccttaagtgagcattggagttcataattgatctttaggagatagggttacataaaggaaagagcattaattttaaaattaatgttggtttagatcccagatctgccatatatagctgtgtgaccctgaatgagttaactctttgcatttataaaacgggacaatgtcacctgcctcataggatacttaggatcaaatgcgtttctaggaatccctgagtgctttgcaggccataaatgatggatggatatttttgttatttactaaacgagttagctggtttgggtttctgtatagtgaactttttgtatagcgaactgattggacttctgaatggaggagatggacagaaagtaatccaaaggcttgttgaaagtcagtttgaatctataaatacaatgattggtagctgaaaaatattagtcaaaatgtatagtgttgctcctgatgagagctggctggcttttttcaaaaagtagtctaagacaataaaaacagtctgtattttataggtcagatgtgtgctaccttcctctgtccacgtaggaaataattgctttttcactttttaagaatgcatcagttgatcaagcagtcactcagtgtgctaggccttgtactccacattgggtgtccaaagatacaagtctggattcctacttttttttttttttttttttttttttgtgagatggagtctcactctgtcacccaggctggagtgcagtggcacgatcttggctcactgcaacctctgaagcccgggttcaagcaattctcctgcctcagcctcctgagtagctgggattacaggcgcctgccactgcgcccagctaatttttgtatttttagtagagacagggtttcgccatcttggccaggctggtcttgaactcctgaccttgcgatccacctgcctcggcctcccaaagtgctgggattacaggcgtgagccaccacgcctggctggattcctactttaagctcacaatccggtgtgggagccagcagagacacttgcattgcagtaaactgtgataagggccattttagaaataagcatagggaaattgttatgtgcctttcttttaaaagtctttaaagaaagcagagtacgtgtaaaataaatgaggtacatagtaagtttcccttcactggctgaccattggttttttaagttttgtgtggaatgtactgtggttgccatttatttgagtgcttactgttttatatcataaacaggtttactccttacaggaaccctagtaagtagatttgcctatgtttttttttttcttcacagagtcttgctctgtcgcctaggctggagtgcagtggcgtgatctcagctcactgcagcctctgccttcaggctgcctcagcctcccaattagctgggattacaggcgcctgccactatacccggctaatttttttatatatttagtagagacggggtttcaccatgttggccaggctggtcttgaactcctgacctcaagtgatcaccctcctcggcctcccagagtgctgggattacaggcgtgagccaccacgcccagcccagatttgcctgtattatggatgagaaaacaaattcacagaggtcacatagcctgtggacttggtgtgcggtactggtaaatcagactgataggcttcattatgtcagtgggccccaaactgtagaaattattcataaggtcaaccaattgggctgtctttatggatcagaattaacatagtgtcttttggattgattacttaagccaagaagtcaatttattgtcatatctaccattaagtcacatgtgtaaccttgcgcctgtcacttaacaccctcagtaagtttaatcatggctaattggacataattagcaatgatatgcaacagctgatgtgaaagagggaagggattttgaaataatagaaatgcagtttctctccaaattcagtgttcactggacttagtgctaatgactttgtattacagatatgctgtgttttgtttcctaacaaagaacctgcaaatgtttgaatggaattaaatttattacaggactctaaattttatatgtagaatggcacacagacagttttatagtgggtgttttttagtgagtagttttctctgagagccaggagtgtttaactttttctgggtaacacccactaaccacctggtcccactgactttctcagtcccttctgcagtagcttggcatctgatttttcttcagcagagagactccagaactaaaacttctgctgtacagtgctgtggatgctctatctggaatggtacatctgtgaatgctgttcagaatatgtgatcagttccttaccccattgaaacattcgagcctagatttttcagattttcttgtcagttttcttccttattctcatttctttatctgctttggcctttgatttttatctcatctagaaaaacatacatgcactttattaataacatctctttttaagtcacgacctagctacctttaaacctatttcctctagttctgtctggttggctttctaaggagaggcattgtaacccttaaacgtgtgctgtttttttttttaattgatgtgtaatagatatacatgtgctcttttcttgtgtttctaccactagagtttaagctctctgaggggaggactacactgctttcttttaaattcctctcaatgaataatccaaagagttcttagaaatttggtagtttttcattttgttagttatttcaacacacattggattatatgtgttacatttttgtgaggtagcttaagaataaaaaataagaatggcttatgagcctttactctaaccagcactatatgggcattttatgttcattatcttatttgatagctattaatgtctctttttaacactgagaaaacagattcaggtaagttataatgtggaaatgtagaaaaatcacctactttctctttagaagctcagatgtgtatgtaaggcttgctaaaagcagaccccaccgtatattttatatgtatagagcttgggtaattcctgacatataataatggagtcttcatctgaaatttctaacaaattattaaattcaaagcttattattttcgaatcgagcatgttctttgccttgaaaacaaaacatagctgaaagccagtgcttctaaaggccacagctgtcattttcaaccctttctgtctttgcactgcctttatttaaaaaaaaatggattagcagtaggtagtcttctttttcttttctttctttcttttttgattcttctcctaggatatctgctctagccactgggaaataacttctcagtattttgaccctgactagaaagatgtcccttggggaaggaattgggatagaggggctaggctgtttcctagatcctctattttcagcatttattatctgatttaggattttgtttctttgaagaaaatcctattttgtgagtacctttagaattatttttcatagctgtttatctgcactagtggtttctctttaaacagaaaaacactttttttcttaaaaaaagaaatagtacccaatttttaaaaaagtaatacatacttgaagaaaatttaaaaagataggaaaatgaggatataataatgttattacccagagacagaaccagtgttaaccatttggtgtaacctttctgttcgggtttgtttgttctttaggggatattttacagaaataaaatattgtgcagcctcgtccctccagcccccattgctcttaaataaatcttttcatgacattaaatctcttcttttgatggccacgtaatcttgtaccatctatctccttccctcccctgcctttttttttttttttttttttgagacggagtttcgctcttgtcgcccaggctggagtgtagtggcgcagtttcggctcactgcaacctccacctcctgggttcaagtgattatcctgcctcagcctcccgagtagctgggattacagtcatacaccaccccggctaatttttttgtatttttagtagaaacggggtttcaccacattggccacgctggtctcgaactcctgacttcaggtgatctgcctgccttggcctcccaaagtgctgggattacacacgtaagccagtgcacctggccagtctccttattttttaaaccattcccatattgttggatatttagatttgcttccattttttcactaagcaatctctgcgtttatcaacaaatgcttcccagtcctgacttgctgcatccagtggcttagaacagattgacagccatcatcatcatataggtgtgctggagagctcctgttctcaagcacgtcagtctcttcctgaaatatgcccagcacaaggaaaatctcttggcttactgcagggttgggccttttgtggcctctaatgagtttgcctgcgccagtatcttgatgcttctgcagtggtgccaggcctgacgatgagactatagtctttcaaaaactttttaggagacaaataaagagtatcttgctgactttttttttagtgggaacctcattcaaagtcttggaacaacagtaggtcttgattaaaaaccatcatggcatatcactagaaaattcaattagaaactaatggataaacttcagttacatttaacatatatgtccattttaacataacatactaactatctgtacaagattaatctagacttttgcttttccttctcacaaaattgtatatttaaaaagaaaattcaagcttatggttttatgggctgctacagtgtaatagtcgtggagaagaataatagtacttcagtttgattttgcactatgcatttttcaaggaagatttccacatttagtattctttaattccctgcgcctcatcttcacagcaactctactgaggtagatgccatcttcattttatggattggaaggctgagatttaacatgctcacatggctgtatagtggcacattgcgctgtgacacacagtcctgctgccttccgactatactacatataggtactctgtgttccttgtgctctcccaataatgatttgtagaaaaacttgatattcatttgcatatgagttttgtgcttagcacagttataagcattaaatgtgaaacaaacatgaagctttcctttgagggcacacacgtgaagctgtaagtggtacagtactcatctgtatcacagaatggcataaagaagtcctagaccatgtaataggctataagtatattcagagtcataggcaaggtaaatcagtgagggctagggcagtcagggaagggtttgtagccctagaagaatgggtggagttcagataggcaggcagtaaataggagagcactctagatgaagggaactacaaaagcagtttcagacacgtttgagcattgtgtttatagggcatgtggtgctggccagcctgagagaaaggtacatgttggagaacagtggatgagaaagccaaacaagtaaagaggagacaatttatcaggaatttgaaagccaggtagagcttaaatttgatggagtagccaaaagggagtcattggaagttactgagtaaggacaaaggcaagactagaggtaatttaggaagagtaattttttgtttgttttgagacagggtgtctgtcacccaggctggagtgcagtgatgcagtcatggctcagtgcatccctggcctcctagcctcaagcgattctcccatctcagcctcccaagtagctgggaccacaggcatgagccaccacacctggctaatattttattttttgtagagacaaggtcttactatgttgcccaggctggtcttgaactcctggtctcaagcgatgctccagctttggcctccaaaagcactgggattatagattgatctgccatgcctgactggaagagtgaattactctttgaatttcagagggcacagaaattcaagaaactaggtacaaatgtaatgaagatttaatatgcttgtgaggctaataggtgctttgaattatttgagaaaagggagaactctaccaactctgcagttttatgcttacatttcaggatcagtttgttcattcagcagatatttgttcctaccaattatgtacaggatgctgtgggagatatgtccaaaggagcttatggtgtaggaagggaaataggagacactatgtaagtaattttagtactgaagaaacgtggtaagacattgacaggtatcagcgaaatgctttgtgagaatatattcattagagcaatgccgtcccataggaatagaatataagccacatgtaatttaaatttttctggtagctgcatttaaaaatttttttaaagtgaaattgattctatctgtttttacttaacccattatgaacaaaatatgatttcaatatgtggcactagccacattttaagtgaatagccacatgtagctatggctatggcttaaacagcttaagaaaggcttcatggaagggatggtatctgagccacactgtgaagaatcttgtatgcagagtaaatttgggaaaagccattccaggtagagggagtggcttggtgagcaaagatagaaaagcatactttgtatgtaagaaaaccattttggcagaagcacatatgatgtggaaggcatgatgtgggggtctggaagataggttggcaagctttcactgataggggaggaaatctgactctgcttttggcatcagggaactttaaagaattttgagcgggaagtgacttgagcagagttataggaaaatgggtcttacagcaaaggcatggagggggctgtagataatgagtgactgaaagcattgccactagggcaagattttggatgggagatttattgtagatgtagaaataggaacaatttcatttctcctttgctgccttcctccaaactgctgggtgttgtgtaacccatttcctgttgaaattggtctagttgcttcaaaatccatgttatataagtcaaaagttatgtaagcagtagccatcaggacctttagctatggattttgtttgttgtaagttgtttctgtatgtgtataattaaaaatatttgaaacagataaatggatacagattttaaaaaggtgtgcattcagtccttatcttgccatgatggttctcaatctctaagaaatcttgcagtaatctcggagaagcttaaaatagctgaccccaaacagaaagggtgcattttattttgggaaatagggaaggcatatttgggaggtcccactgaatagtccagattctttggagtagtatgatttaacttttaatccttgagaaggagagaagtaaaagggggatagcttaattttggggcctagtagagctgaagaggttgatggcattatttagcaacggcaatcctttattactccattatgataccacatgggatggcttagctctgaattggcttttggccagtactttatgatttggagtaatccacaggtagagttgcataggtactgttctatgaactttgaagtgggcctctaagtgacttctaactttgagttagtctacagactggaaattttctgaaggttgttgggtcattgaaagttggcttctttctggtgtacctggcacttttagaaaccatgaagtagggttatttaatgatgaagatatttattgtcctgatctcaaagaccttatggtcaagaaagttagatatatgaagacagtggtcatcctttggtatccagggggtgtaggttccaggacacctggggataccaaaatctgaagatacttgtttattttgtgtttttttccttctttattttccaccacggttggttgaatctgtgtatctggaacctgcagatatggagggccaactatatatacttttaagatggtagagtatttttgatgtacttgtattagagtagaacaggttgtcttgtggtaaccaacagctccagcatctcaatgttttaacccagcaaaagtttcttttgttttcaccctgcgtgtccaatgcaggtctgcaggagtcttgcactatacagtcacccggggactcaggctgacaaaaactctacagttgcatgactgtaccacctagaatacatggccttctcagtggctgctgtgagggaaaagagcctggggaggcacacgtaggatattcacagtgttagcctggaagtagcgtcatttctacttatctttcattggacagaactaccatgtggcctcttctgactgctgtgggggttctgggaaatagaagggaacaaatggaatgtttcttgaggattactctctctgccttagttttattctagtgttgtgagtgaagatgtcagatggatcaaagtgagacttgcctcactgagtgtaagcttacaattagtgagccttatataagacacagctctgcatgtgatttagataataagcagtaggaagaaaaattatagttatgaactggagaatcaattctttctgaatcacctagattttgagtgtatcttattgtgctccctaaaacatttttaggtgataaggccctgtgtgtagaatttctctcttgaaaatacagaaatgacttttgaggcaaaatcattttgtgagtggaggtcatactttcttgttttttttttccttttttttttgagatggaatcttgctctgttgcccaggccagagtgcagtggcgcgatctctgctcactgcaacctccgtcttccgggttcaagcgattctcttgctcagcctccccagtagctgggactataggcacgtgcactgtgcccagctaattttttgtttttttagtagagacggggtttcaccgtgttagccaggatggtctcgatctcctgacctcgtgattcacctgcctcggcctcccaaagtgctgggattacaggcatgagccactgcgcccagcagaaaatggttaatttaaaaatagcaaagaggccaagtgcggtggctcacacctgtaattccagcactttgggaggccgaggcaggcagatcacctgaggtcaggcgttcaagaccagcctgagcaatgtagtgaaaccccacctctactaaaaatacaaaatcagccgagtgtggtggtgcatgccagcagtcccagctactcgggtggctgaggagaatcgcttgaacccaggaggcagaggttgcagtgagccgaggttgcgtcactgaactccagcctgggtgacagaatgagactccgtctccaaacaaataatcattttcagagccttaaattgtgataccatgtatgtagtaatgaaagaatttgttttgaaaatactggcattggctaggtgcagtgggtcacgcctgtaagtcccagcactttgggaggccaaggcgggcagatcacctgagtttaggagttcaagaccagcctggccaaaaatggcaaaatcccatctctactaaaaatacaaaagttagctgtgcatggtggcacgtgcctgtaatcccagctacctgggaggctaaggcaggagaatcacttgaaccctggaggtggaggttgcagtgaaccgagatcccaccactgtacttcagcctgggtgacagagtgagactctgtctcaaacaaacagacaaagcacacaaaaaaacctgacattactactactgtttaaagtagcatttcatgtttttatagctcaggatattagtgtatttttatactgtgtggcacagattgatatatcaatatttaaaccaacagtacataaaattaactcttcttgtttagtaaataacttttcaattattttatccaaaaattacttattaaaattaccgcactctgtaaatggtgattattgcagtggggaactgactgtggtgagttgataagagatattcactgattggcatatggatttgataaattgataaactgaagtcactaggatttttgtctatttcagaaaaactttaaatgaactcagttatggttcagatgaattcagttatggtttcaagttatgttgctgtacatcttgttatacacccctttctcttgcaacctataccatatacaaaattagtgcctgatatttttatataatgctttatactttttaaggtgccttcacatgtatcaggtcttttgttcctcataacaggcccactaaaagagttggtagtgttctttctttttttttttagagacaggggtctcagttggttgcccaggctggaatgtaatggcacagtcacggctcactgcatcctggaactctgggctcaagtgatcctcccacctcagcctcctgagtagctgggactacaggtgcacaccaccacacccagccaattttttcttcttttgtagagatgaagtcttactatgttagagactgatttgccaggataatcttgaactcttgggatcctaggcgtgagtcaccacatccagccctgggtagtgttcttattgcccagtagagaccgaagctctcaggttaagtgatttaaccaaggtcatgccacttgtaagtaagtagcagagctagtgctagatagagcccaagtctgactgcccttagtttatgttcttcctgtgcagtgtgtcctagtaacaaagttagcagattacagaagatgtgatataatctttcccatccttcagttatctactgcttgatgggtgcagccaaatagatcatttaaaatcatatcttttgcttcaggattggttgaaacaaacatcatacttactctttcctgtactatggaaaaaacaggtttagtcaaaaccagagttgcttacaggacagtgaagagaggacttcctgtattacaggatacagttggattaaggtcattaaaacaaaccagacaattactgagagaagtcaaggacatatatatagtaagcataaactttttttttgagatggagtctcactctgttgcccacgctggagtccagtggcgtgatctcggcccactgcaacctctgccttttggtttcaagcgatcctcctgcctcagcctccccagtagctgggattacaaatgcctgccaccacgcctggctaatttttgtatttttagtagagatggggtttcactgtgttggtcaggctggtctcgaactcctgacctcgtgaattgccctcctcggcctcccagagtgctgggattacaggtgtgagccactgcacccggctagtaagcataaacttctaaagaaatagttattaagcagtctgtatgtgccaggcaggtgaattaggctaatggaagaaaacaaaagctctagagccagatagatgtgagctggagttctggctctccaccatctatttgcatgttgctctgggcatatcacttgccttccctgaccctccatttcttcacccataagaaggggaaagttgttgttatgaacatacctactctgggactgttgggaagattactggaccaaaataatataaaggccttagcaaagtacttaaccctagaggtgtttgatatatcatcaatattgttgatggcatttggaatgagatgtttcacatttagtatgctgctttccagatgggttggaagaagattcacacacgtttcctaggccccgaaacctgacatttgctctttctttttctcttgctcttgttctagggaatgacaatggataaaagtgagctggtacagaaagccaaactcgctgagcaggctgagcgatatgatgatatggctgcagccatgaaggcagtcacagaacaggggcatgaactctccaacgaagagagaaatctgctctctgttgcctacaagaatgtggtaggcgcccgccgctcttcctggcgtgtcatctccagcattgagcagaaaacagagaggaatgagaagaagcagcagatgggcaaagagtaccgtgagaagatagaggcagaactgcaggacatctgcaatgatgttctggtaagaggccagtgcttctgttttgaacagtggtttctaaatagtattaatttaatgtataaatgcagactctcaaaacagcttatgagagagaggtgtctgaatatactggaaagctgccaggtatttacaactaatttttaagcatatgatataatttgtgtcacctattgcctgatcagaggttgtacatcacttctgagatactttcctctcctatcaaaaagacctgtgaaaaacagtgacattttttcagcctccctccatcttttaaaattgaggccagatagacaggattttaatagatacagctacagataggctattgtgtatattagtcagagtagtgatgtcatcgccagtaggggagggagatgaaaaagctgagctgcctttcagcctctccccagtcatgccttcacactgtaaagtcctgctttggtctgaaagttaggcacatccatcaagttcggcatgcattccagagccaaattcaaagtgttttgggcattctcctctcctgtattttacataaacccttagtcagatgattgattccctctggccgccacttgggattgaatgggaggggtacgtactccaaaacaaatcataatcatattgtctttcccgcacatcctgagccattgggaactttctttttcttccaggtgaaatcaggtaaaaatgaactcagcgagggctgctttgaagggaaaaggaattcacacttggggacctaccaccttccctgctggctgcctttctaaattactgcccatgactcctttcttttgaaaaccagtataaagcttgtcagccatcaggcagcaccccttatccctaacctattaggagttacacactgtctgtctacaaagaatattaaaacgactgccgccccctgcatcttctcactttggttgattaaatccccttataactaagctttgcattgagcttctctttttattagactcatggcgtaagagtgtcatgactaaatttgttgcctgttggtaatttgggggtttgttaatggtgcactaattcctgaatgttaggtacatctggtattcagatgaagtatgtcatgcattccaagggcaagaaagttccataattcatgaaatgtagaccaacttttaagagcatctgaaagaatgtgaagaagagcttggtacttactgcctcttaaccagtttttcaggatgccacattctaaaacaactcttcgaaaatattgctctgtatacgaagcttggactccttcagaactacttttgttgtaagcataaatgtttaaaggaatttattattaatagtattagctactctttgagtgcttactacgtgccaggcaacgtgttaagcgctttatgtatgtcaacttatttatcattataactaccctagaagatggctataccctagaagatgacccttcgtatagctgaggaaagtgaggctcaaagtgattaggtaatttgtccagagtcatacagataataagtggcagaagagggatttctacccaggtcagattgactttaaacttagttcttggcagttttgctctattatcacctttttcctcctaaggaaagatattttttcccctttaattatagaagtaataccagtttgtgggtttaaaaatggtggggggaacaagtcagaagaatataaataagaaagtaaaaatcacttctaatcttaccacccagagaaccattattaacatactccttccaggcttttcccttatatatttgtgagcatgtacacaaatgtatcttaatgttaaaataggattcttgtggtatttataatctgctttttttccactcagatttcttttgagagcctttccattatctgtttagctctgcatcattttaaaggcctacaaaacatttcattatatggctatactttaattatcccctatggatggtcaaagtgatttttaacagaagaatacaggcatctgctgttatgacctgggctaaacaacatttagtagcttggatgaaaaattggtgtttttttaatcttccaaaaaattatttagaagcagtagtgtatatcttgaatctcaaacatagttttaacatctcgtgaataattctaaattcttaacaatgttcattttttaggagctgttggacaaatatcttattcccaatgctacacaaccagaaagtaaggtgttctacttgaaaatgaaaggagattattttaggtatctttctgaagtggcatctggagacaacaaacaaagtaagtaatatctttaaaaagaaattcgaccagtaatggagccagtcttctttcacagggactttttaacgatttttgctttgttcgccatagacaccaatgtcacagtactaagaatttaaaagaccacagcattgtgacgaacggggtcatgggcgggcaaataaaaatttatctgacagggaagtatggagggcattacaaacctggtgcgcagtgtatttaaaaagatcttatcttgagtattatttgttagctctctttttagcagtgaactttttatacttggtggtacgaaactaccctagtgatgcattgcatttatcacatgtattaccgtgatggtggtaatcttaaccacactttattaagtgcttctgtgccaagtacttccgagtctcacttactcttcacacagccttacgagttaggtggcaggctgcccatttttcatataaactgaggtttatggaggtttctacttgccccaagccacagacctagggagtaagagttgggaattaaagtttggatctatcgactctaaagcctgtgatgtttgcactagaatgtatggtttttcacattctatattgttaaaggttatagctgtatttaactgctttagtagactttgtcataattgttttcccccaaagcatttaatatacaacttggtttagaataaatatctaacaaatgtataattgaatggcagagacactgacacttcatttgataggtcattgctcctgcccagtttgggactgagaaaataatttgatagttggtccaatgtgtgatacctatgaaagaaccgagcctttaatattttcatctttatgttacagccactgtgtcgaactcccagcaggcttaccaggaagcatttgaaattagtaagaaagaaatgcagcctacacacccaattcgtcttggtctggcactaaatttctcagtcttttactatgagattctaaactctcctgaaaaggcctgtagcctggcaaaaacggtgagaaagaccctttgtgatatctaaccatagcaaaacagtgcttgtgttattaacttcattttattcctgaacatactcattgtcttggactttttttgaaagattttctgggggtgggagtgtatcttttatgagataaatacagatctgttacttttttaattcattctcaataccttctgctgactttgtttgattactgttttttgcgggtggttgtagaaagttccaggtgaatgtagttagttgtttcttaccaagctttgggccttggttatacattgtcattctcatgccaagatttgaggttatagttgtataaaagaaatacacagcacattcttgttgtgtgttggattaccttccatattcttcctttggccttctctacatattttttatagtccctcaacatgcacacaactttttaaaaacatttttattcgggaaaggtgccttaaagttccgtcacttaaatcagatttagtgatgtgagtttccagacattttgagttttagtttaaataaataaataattttaaatagaagattgctagaaaagtctttggtaattaaaaaatcacacgcgtttgcccagaatgactgtgctagggttagcagtaatactgcttagttattaggtacagcaaagttcttaccttggagtttctgtcattgttggttggtgctttgtaaatatgccttatacttctgctggaaacagctaacagacagggtaataatagcctaggttcccccaaagtactgtacaagaagataagttatattcacctagcgggaaaaaaagtgggctaaactagctccagagaacttgtgaattctttgctaaaggctctttgttttaggcatttgatgaagcaattgctgaattggatacgctgaatgaagagtcttataaagacagcactctgatcatgcagttacttagggacaatctcactgtaagtactacttccacagggtttatagtctctttcctattcacctacttaataattcactgttatcttcaagaggggatttgtaccattaaatgtagttacagttttaagttgttaaatttgttataaatgactgctgaagttttgacctttgcaatcatccctgtctgcagtgacacaggaataattttaaactgtcgagtgagataagattatacatactgggccacttacctagggaacttttagtagccctgctttgattatacttcctttctcttgcagctgtggacatcggaaaaccagggagacgaaggagacgctggggagggagagaactaatgtttctcgtgctttgtgatctgttcagtgtcactctgtaccctcaacatatatcccttgtgcgataaaaaaaaaaaaaaaaaaaaaaagagaatcgtacgtcgactttcgatttttcacagcctcagcctaggaaaaatggttcatgggataaacagctggtatttgtatctaaaactcagattggtcacataaatgccacggcattccgaagttttgattttgattaacattgacaggattactgtgtgtttaattttttaaaaactgaacactgtgattatggggttttgtaatttagcagaactcttactggtagaaaaaatagacctgaattatgtgtaactttttggaaggtttaatctgatatcaaaataatcattgaaatacaattccattgtaaagttgtacagaaagttatagagattatattgtgatgctggaacttggagtgagacacacatcatttggcatttgagttgaatggtaattcacagtaatgctgccgttgttcgggacttaaagacacttgacctgtttgggctgttgccacttaaaagttcatgaccacaaatgtccacagtgtcttcctctgaggaaactcgaatcctgaaatggaaattctttgtggcagataactggcttatgacaccttgaaaagttcaagtgctcatataacacaccacactgaaccccctttcctacagcaatatgttcactatgttaccaatttgcaacttgtgcttcaatagtggaatctactttcattgttaacactgagctaaagaaaaaaagccgtgtgttttatgaatgaccttatctgtttcctggataatacctttaagaataatgtcctgagtcaggcgtggtggtgcgtgcatctagtcccaactatttgggaggctgaggcaggaggatcgcttgagcccaggagtttaaagctgcagtgccctgtggttgcacctgtgaataactgcactccagcctgggcaacatagcgagacctcatctccaaaaaagaaaacaaaaaacaaaaaaaggaatgatgttctgtagagatggcctttcacttgaggagtactcagttttcaggttcttcctagctcggggcttttaaattttgaaatctaaacattctttcccaccatcctttttgactgttgaccttggttttctcttctaagtttctgtccctctgcttccttactttttttcctttttgaattctatctttatctgtcttttgttcactttttaatgctatatatgggcaggggtgagagacattactgagcaccttggtgagcaagcctggctttaaagattggagaagagcttctggcaccagaaccctgtcttcctccagttctcaacacggtgttgctcttcagtcataccggaatctgaatcaaaaaagtatttttaaatatccatgatttctccctgtattgaggctagccctgatcatgctttttgtgcctgtcaccaggtctcccaagtgcactcatccaggtcagtgctcagatgtgtttaaggagaccctatattcagggaagttgcgtgaacactgcagtggggagaattgagaatagtcaggcctatcagtctcacagaatcacccctctacctttgatattccacttagctgtagagtccatctgtttgtccatctgctgaaatgagaaaagaaaaatttatgcactgatttaaaacaaaccaaaaaaaaagaaaaaaacaaaaaaaaaaatccctcctttctagctgaacaaaaatgtgcagttaatacttggcgcttgaaaatgcagtagtgaatgtggaaccaagcctgtctgtatatctggtagctcttttcttgctttgttttttcttaccagtattctgcctaacgtttgcttctgtgatggttatattgcctagcaagcacacccgtggttgtgaaaatagtatagcaaaaaagaaaaatccccggttattgatgtactagatttgtgtatgtcttttaaacagttctagtttcaccttacacagaataatcaggaaaagtgtaaaaattcaaaagtgaaataaaaattttatcagttagttgcctgtgaattgatgtgtcaccaccatctctgttgttaccagacctagctaactattctgatcacacttatttttaactctgttttctttaaaaataggcaaacagttttatttcattatttaggaccagaagtcaaggtgttatccaggggaagaaattaccattaattaaacagcctctttacacccgttacttgatacctctctaccttccacaacaaaccatgcaggtattaggtcctctttagtgacttctaagatttggtatggacagttattttgcattgtattcgagcccaccatcccttccccattttttaactctgagatacaaccaagccagtgaaataggtaacctatggttgcataagtcttggtcatcaccaagctggcgtctcacctgtcctcacactgtatggtggcctgcagagctggttcctcacaggatttgccccttctgaaaacatccacattaccacaaggagagaaaaatatcaggatagaggggtcttttttagcccaagattagaattagtgcttccttgctactctgaggctggacagccagatgggcaccttctgtccctagtttaggagctgttccacctgttgaagccacactcaaccaaaagtcagtgggggcctacctgctctgttggatcagtgagaccaggaaagtcctatcagaggaaaagtgaagtattggtgctcagtggagtagttgttttgtttttgtgttgtttttaatgtccctataccacagattgacgctgcaagctcagattcacagtcttgctctgtttaggtcttgctctgctattagttcccaattgtccgcatttaggctgagccacaagtaactcagtgaacctccctggtgtaatggatgtgtaatggcttagcagagggacagggaatatcccaggaaaaggggtcttggtaatatgagccagtaccaagaaaggccttagtggtctccagttctcatgtctcaaagccatttccatccttggtgcgaaacggtgggactggatcaggctctctggaggaagacatcttcaatggagcagggtaaaattctctacacaagctttgaaacagtggcctgttcggaattccgtttgtgtgtgaaacgcaaaaagcgcggtttgggtctcctttcattcttgtcaggagggaatcattcccattttacagagaagggaaacgggttcagaaagatgatcatctgttccggggttagaactcagtcccctgcgtcctttccgtcccagtcctcggctctttcaaaagagctgggggttttgagagctccactcaagtcccagcagccctgctcaaggccaggttgaaggctttttccgcctcccagggcggggtcagaggtgtccccacctgtagcttttagatccccaagtgctcgcaggtggggggtgggcccaggagggatcccgggggaggggcgtccgagcgcgcccacgattggtgcgcagggacgcgggggcggtaaagggaaggggcgggcccgcgcccaggaaggagggcttccgcccgggtgagcgcggggctgctgggtgacccggctcctgcttgccccgcagccccggccccctgcccaccatgaacgccagcggttctggctacccgcttgcctcgctttacgtgggcgatctgcaccccgacgtgaccgaggccatgctctatgagaagttctctcccgccggccccatcctgtccatccgcgtgtgccgcgatgtagccacccggcgctcgctgggctacgcctacatcaacttccagcagcccgcggacggtgagccccggggatggggcgggaggggaaggaccgacggacaagcaggcggacagacagaagccggaactgggccgcttgcgctttcatcttacactttgcagccggggaaactgaggctcaaagataacagggcgttggcagaggcctggcccctgagacgggaattggtaattagtgtggtttactgctattcctctacagaggagagagattagggtcgagtgaaaacagatacaggctttgtgggggtgggggtgggggtcaggcggaccagggatagaagcccagcagccgtgtgactctgggcaagttactcgaccattctgagcttcagatgcgtgtctggaaaatgggggtcctagctgccttatagagtgcttgtgaggatgagagattcaaagcacctggtgaggaagatgcccaaggcaacacagctggtgagcaggggaggcaggagaacccagccttgggctcaggcctttcccagcgcgacgtgagatccacactgggcgcctctacctgcacgggctctgaaaaaccgctgcctccaggccgcaaggccgctttctcagagctgatagcattgattagagcttgtccgatgagtttgcctgcacttctgttgagagtggagaggatgagtgagcttgggcaagccttcacgctctgcaccttttcatctgcaaaatggggctaaggcgtattctccaataacataaagaatggagaactgctgtctatgcataaagaatggtaactgcttgttacctcgtaaacgctcttaagtggtaacctaaaataaataaataaataaataaataaataaataaataaataaataaggccaggcgcagtggctcacgcctgtaatcccagcatcttaggaggccgaggtgggcagatcacttgaggtcaggagttcgagaccagcctggccaacatagcgaaaccctttctctactaaaaatacaaaaaatagctgggcatgatggcggacgcctgtaatcccaactgctggggaggctgaggcacgagaatcgcttgaatccgggaggcagaggttgcagtgagccgagactgcgccattgcactccagcccgggcaacagagcgagactccatctcaacacaaaacaaaacaacaaacaaaaaagaaacaacaacgaaaatagtggctttaacattctgatgtaagactccagaaactcacccaaaaaatggccggcgtccactagagggatcccttgcgccaggtcgcctgggtgaacctggtggttgcctgagtgggtggtttgctagggaaggggttgttccgccgggcctgttccccgccccttactgggctggattcctgggcacttttctgtttgttctgctttgctccacctcctgcctcttcccatcttcctccaagccctgtgaatgaagtgggactcggcctggaaaccgtgctgcagagagaagggttttgccccaggtatttatgataagactaggtggagaatccgggcttcctgaaacttgctccactgtgttccccacagcccccttccatgtctctgcactagcagactccctgaaacaggtcacgtgtatcacccaggagagacacaggctgcagcagtggccggaggctgggcatcggctgctgttttgagacattattttgtgtcaggcacaaagttacaaacaaggcacttttacataccttctttatttttcagtccctccaacaacctggtagttggtagtatctccctttgttaggtgtggaaaagtaggtaatattaccatcattccccctttacaggtgaggaacaggctcagagaggtaatgtccactttccccagagccggactgcttgagatctaacctcagctctgccctgcagcacctctgagttttaatttcctcaaagtgctgccaccccttgtcatatggacattgttatccactcagtgtactttagaatccagaatagacctgacgctgccacagacctttcatgtttcttattctcagttttcccatctgtaaaatgaggggcaggaatccatgctcatgtggctgcagggagttggttgaatgagatcataactggaaggttgggggagcaccatacacactaattctcagcttatccttcctgagcctttgggctcttatctcagttatttgggctcttatcttggcttattgtctgggacccagacaatgactttctctttattggctcccagttaagcacctcgaggggtgggtgatcaaggtaagaaaattccctaaacttgctaatttctctcctcttccttctgtccagcggagcgggcactggacacaatgaactttgagatgctcaaaggccagcctattcgcatcatgtggtcccagcgagacccaggacttcgcaagtcaggtgtgggcaacatcttcatcaagaacctggaggactccattgacaacaaggctttatatgataccttctccacctttgggaacatcctctcttgcaaggtagaggatgaagggtgtacgtctttgggtagatcggtgtcaactacctgcctggtagaggggtgacaagcaacacctcactttacagtttacaaggtcctttcagtcaagtttcaggtacagcaagcacctgaatgacagccgttctttcagtttcatcttccgtgaatgaccagacattacctgtgtatcagtcagctctcgctgtgtaaccaccttcaaatttagtggccgtcaacaacaatcatttatttagctaataattccacagttggcaatgggcaaagttcagctgggcagttcttctggtcttggctgggttccctcctatgcccactgaaagctgagtgggagctctcgctgggtatatgagggagcgactggctgtcagctggaacatcttggctttcctccctatggccttttgtcctccagtaggctagtccaggctattctcatggtattctcatggcaatggcaggggctcagaagacaagagtggaagcacaccaggcctcttgagaactaaatgcagaactggaaccatcacttccactacgttttttttttttaattgagatgcagtcttactctgttgcctaggctggagtacagtggcatgatctcagcttactgcaacttcctgggttcaagcctcctgagttcaaacgattctcctgcctcagcctcccgagtagctggaattacaggtgcgagccaccatgcctggataatttttgtatgtttagtggagacagggtgggtttcactgtgttggccaggctggtctcgaactcctgacctcccaaaatgctgggattacagccatgagccaccgcacctggcctctttcactacattctattgaccaaagcaagtcacaagaccagcccacattcagagtgagaggggagtagaaattataggatgaagggtgtggctacaggaaggccattaattggggccatcaaggcaattaagttattgaatcttgtttttaagattgtcttacattagatgtaagttccatcagtgatcttgttcttagtcattattgtatcccaatacttagaataagatgtgaaacatattaggtgctcaataaatatatgttgagccagtggaggtatgtcatttgagaaggattctgattatttctctgactttttatatgaggatgttgaggatcagcggccatatagcaggtcagtatgtctggaacagagggcttaaacctgggtgttctgtctctagattttataaggatagttgatcagttaccccgtagcctttggagtgtctgctattctagggaggatggggacagtttttgtagcctatgtgtcagaacttttttttttttttttttttgagacggagtctcactctgttgcccaggctggagtgcagtggcgcgatctcagctcactgcaacctcctcctcccaggttcacgccattctcctgcctcagcctcctgagtagctgggactacaggtgcccgccaccacgcccagctaattttttttgtatttttagtagagacggggtttcaccgtgttagccaggatggtctcgatctcctgaccttgtgatccgcccgcctcagtctcccaaagtgctgggattacaggcgtgagccactgcacctggcatgtcagaacttttatcaagtgctactgtgtgccaagcataatccttaagttctcaacgagggctctcaaattcccagtcaataagaggctatccctgtggctcagaggagcaggtagacttgaggagatgtagtaatgcactaagggttatctgtgacagagagacggggctgtttcctgtctttgaggatcaaaggaagaaagactcttaactgtgtattaagttcttcacaataataatggcagatttatcatgtactttctgtgtgttaggttttctgcatacatgtatactccttaaaagggtacctggcatactgttaagcttctaagtgataactgtaacaatcaaagaattacttctgttggctgaccttggacaagtcatttattctcattttccctctggggctcagaggttaagaaatgactgaaaggattctcttatgactggcatagataacaagggaagtatgtaatgcccttagcaggttcttgacccacagtggggacccagtcaacgtggttaaatccaagctgaggcttgagttgaaagtggaaggcccctgtttcaggatgagaggtggaggggtatgtgcaaggcatgggtttggaagcaagatctgttgtgcaacacccactggggagcctcaaatgccaagttgatatagttctgtggatagaagctactagagattgaagggatgtggtcagaattacattttagaaagagcatcacagtggtagtgtgcaagctaggctgggaggcagtgcttgtcatccaggcagaaaatgccactagctgagctgagcctgtagccacagggatgagtggagccacagtcaccttgaagtggggggttagtggtctttctgcgagttcaacaagagggatgggggctatgtgaactagaaggtctttccttgttctcaagttctgtcctgctggcctgagtcaggagggttacagaatgggaataggatattgtgcatctttaaaaaaattgaggcggggtgcagtggctcatgctcctaatcccagcactttgggaggcccaggtgggtggatcacctgaggtcaggagtccaggaccagcctagccaacatggtgaaactccatctctactaaaaatacaaaaaactagccaggcatggtggcatgcacctgtaatctcagctactcgggagtctgaggcaggagaatcgcttgaacctgggaggcgggggttgcagggagccaagattgtgccattgcactccagcctgggcaacaagagtgaaactctatctcaaaaaaaaaaaaaaaaaaaattgaaatgagtctgttgttgcagtaattcatgtattggcaaagtttaaacaatgtggaagggaagaaagtgaaaaacaagactccatttctttcagccctagtccccaaaagtaatatgaatacattttatgtgtctttttcaaaatttccaatgtgtagatgcctactttagcctgaatggattttttttttcacttaacaagactgtcaggccatgtaacctaccacattctcttcaactgtgcacatacagtagactggtgtacaattgaggctcccccttgatgaataccccggttgtttctagtttgctgatagaaacaaggatgcagatatgggggtttgaatctaacccttttgcccattgccttaggaagacaattaaaagccagtatgcagtatagatgaaacctgtgttcatttcgttctccctcttaaatctgttttttcttttctgtttttatttttttgacacagagtctcactctgtcacccaggatggagttcagtggtgcaatatcagctcaccgcaacctccgcctcctcggttcaagcaattcccctgcctcagcctcctgagtagctgggattacaggcacccaccaccacatctggctaattttttgtatttttaatagagacagggttgcaccatgttgtccaggctggtctcgaactcctgacctcaagtgatatgcccacctcggcctcccaaagtgctgggattacaggcatgagccactgcacccagccttccttaatccgttaacttgagtggtgacactctttgagcttccataccccatccctaacatgcaggattgccttttccaggcacagcaggcatgcagagactggtcgtgatcacctttgccattcctttctacctgaaccctctgtcagtactcttcctgtccttcctccctgtggcccaggtggcgtgtgacgagcatggctcccggggtttcggctttgtccattttgagacccatgaggccgcacagcaggccatcaacaccatgaatgggatgctgctgaatgaccgcaaagtgtgagtggctgggcccgagggaggggcggaggctgcagggacagaagcatggcaccaccgactaggaatcgatgctaccctcaagctgctaatgggcaccaggcacttgagcggcaggcagccctcctagaagtgtgagcccggagcagctgctcaacctctcagggactctttcctcacataaagatggagctgatgatctgcattagagtatggtaaaggaagtggtgattttaaaactctagagggactggctaatggtcatatcatcaatggactcagtgttttcatctgttttccagccttctcagtatggggtgtatgtgtgtgtgacagggtcttgctatgtagcccaggctggagtgcagtggcatgaacacagctcactgcagccttgacctccttggctcaagtaatcctcctgtctcagcctcctttgtagctgggaccacaggtgaccacatgccaccatacctggctaattttttgatttttttttttttttttgtagagatggggtctcactttgttgcccaggctggtcttgaactcttgggttcaagtgatcctcctgcctcagcctcctaaagtgttaaaatgctgggattacaggcatgagctactgcgcctgactttttctttaaaccttttgtgtttcatgagattttggcagaaagaaaagtaggcatatgctaagcctgccctcatcatactgttaacttcgatatcatccccactacacagatgggaaaactgagaggcagataatagagagaatctgcctctggctgttccctgcccagaattttgattttgttcatctgagaggccagctcacatggtcagggccatggagagaaggtggctttgagctgggggatgcactgagagtcattttgtccagggttactcagaggagggtccagtcaacctgtcaaacaaatcttggtgggcttttcccagttctcagaagaatgctcttcgttagctccaatttactcaagttcacctttgccactcagttttcttcaaattttggtgcctggtacaactttgtttgtgctaaacgtgctatagataccatcagaatttattattatttttttaatctgggatgctttcctagatgtgtttacatgaacttggaaatgaacttttaaaattaatcttgtgactgggtgtggtggctcacacctgtaaccccagcactttgtgaggcagaggtgggtgaatcatctgaggtcaggagtttgagactagcctggccaacatggtgaaactccatctctaccaaaaatacaagaattagccatgcgtggtggcacatacctgtaatcccagctacttggaaggctgagtgaagcaggagaatcgcttgaacccaggaggtggagcttgcagtgagctgagatggcaccactgtactccagcctgggcgatagagcgaaactcagtgtcaaaaacataataaataaaaataaaattaatcttgtatttaagtgattttagtcaatgccccccatagcaacactagcattgactgcgtctaattcacttacccctgcttccccagtgcacccaatacatgttaataagcaaagccccatgatgagaatttgagtcccaattttacagcaatgaactctgaggctcagagaggttaagtagcttgcccagggtcacacagctaggcaactgcagagcgaggattcaagcccttgtctgtctgactctcaggctcattcttctgtgctctcagctgcctggtatataatagtaattatgtgtgcatttgtcgcaagaatgaaatcttcttaaccttctgctggggacaagctctggaacataatataatatcttggctattggaggtagccgggccttggggatgttctaaggagtattgtcctgcccagtttcctgatgagggatatgtaagcctggagaagggcagcagttgagcaggagttggcatgggggtggctgatggctggtagctgtccacagccatgagccagtgtgtcatgtccacagctttgtgggtcacttcaagtctcgacgggagcgggaggcggagctgggggcgcgggccctggagttcaccaacatctacgtgaagaacctcccggtggatgtggacgagcaaggcctgcaggacctcttctcccagtttggtgggtgtgtccccaagggagcggggggatcactgtttttcctcttcccttccaaagtctggtagggaggaggggctctcctggggtttcctgaggacttcccagactcccctttgagccaggttggtcctttgcagggaaaatgctgagtgtgaaggtgatgagggacaacagcggccactcgcggtgctttggctttgtcaactttgagaagcatgaggaagcccagaaggtaggagcctccccatggctctgttctgcagcagggggaccgagctgggactaagaagagggtcccagctgcctgtggaggggaagaaagtccctccccggcctaagccaagagggtgggagagtcctgtgtgcaggcaaagcccttccttctgtggtcaaaggccaagggcttcattctttggtcacttctaagccctgatgtccgcagagctgaatatttaggtagggatgcagaagtcattattatataaaaatatttactcatgaactgaccacttaaatcagtttccaccgggtgtggtggtgtgcacctgtagtctcagcctacgtgataggctgaggcaggaggaccccttgagcccagtggtttgagtccagcctgggcaacatagcaagaccctgtctctaattttttaaaaactctccagatgtgatggctcatgcttgtaatcccagcacttggggaggctgggtgggaagactgcttgagttcagttcgagaccagctggacaaaacggcaagatgccatcttcacacacaaaaaggctctcacagttagcaaagaggattattttgtgccttgaaatccaactcaaagtaaggatgttgatgatgctgtcatgccattatgagagaattatgcttgctactttgttcaaattatccatgtgtagttgcagttagaacctaaatttttttaagttctttaagttcttttttcagtgtagttttaagttcagagcaacgtttagtggaagttatggaggttttctgtataccccattcccccaacacatgaacagcctctgccattatcaatgtcctgctcccaagggttacgtctgttacaagtgattcacttactttgacacatcattaacacacacagtcccaagtttacattaggatttacttttggtgtagagtctaggggtttggacaaatgcataatgacatgtatccactattatggtatcatgcagactactttcagtgccctaaacatcccctgtgctccatctgttcattcctccatgccccttaacccctggcaaccaatgatctttttgcttgctccatagttttgccttttctgggacagagactatgtcacctagactggcttctttcacttagtaatacgcatttaaaatatgggaatatataaatatttacattttattttatttttatttatttatttttgagacagagtctcactctgtcacccaggatggaatgcagtgacgtgatctcggctcattgcaacctccgcctcctgggttcaagtaattctcctgcctcaacctcccgagtagctgggactacaggcgcccgccaccatgcccggctaatttttgtgtttttagtagagaaggggtttcaccatgttggccaggctggtatcgaactcgtgacctcaagtgatccacccgccttggcctcccaaagtgctaggattacaggcgtgagccaccatgcccggccatatttacattgtaaatatgggaaaatttgcaaatctcaattttatttttatgtttattttattaagatggagtctgtctgtcgtccaggctgtagtgcagtggcgtgatctcagctcactgcaacctccacctcccagtttcaagggattctcccacctcagcctcctaagtagctgggattacaggcacctgccaccatgcctggctaatttttgtatttttagtagagatggggtttcaccaagttggccaggctggtttcgaactcctgacctcaagtgatccaaccgccttggcctcccaaagtgctgtaattaccaggtgtgagccactgtgcctggccatcaattttgtttcttaaaatacagccccagtccgaattttttttttttttttgagatggagtttcactcttgttgcccaggctggagtgcaatggcgtgatctcagctcaccgcaacctccacctcccaggttcaacgattctcctgcctcagcctcccgagtagctgggattacaggcatgtgcttccatgcctggctaattttgtatttttagtagagacggggtttctccatgttggtcaggctggtctcgaattcctgacctcagatgatccgtccccctcggccacccaaagtgctgggattacaggcatgagccaaagtgggtatacttaaatggcctttgtcctggtactgattattctcagctagtgtggccagcctggtttgcaggtggcccctctagatccagaagatgagcctgggccagggccacatctgagtggttaccaagcatgttccctcctcctttccccaggccgtggtccatatgaacgggaaggaggtgagcgggcggctgctgtacgcgggccgggcccaaaagcgcgtggagcggcagaatgaactgaagcgcaggtttgagcagatgaagcaggaccggctgaggcgttaccaggtgaggtcaggcttcctggtggcagccacttctgtgtgagagcagctgtgtgtcgggggccctgagtggtgactgtttcttctagtgatcctacttctgggcacttggctcaaggcgggaattgaatgagcatgggatggcccccactgcctaatgtataacagtgagaaactgcgcacaacccaactgtccaaccatcataggggttagtaggggtgctggggaccttttggttagaataatccttcacgtgggactggttagcatcccacccagcccactcaatcccagttgcatcctctagtctcagacaaccaaagtaccccgcatattgccagatgcccctagaggaaatcctactcctggctgagaataatcaggccaaatatgttacatccaaaagttggaatgttggacagcctttgaattatgtggagttaataattaaagtgaatattgtggatcagtgcaatttaaaacttcattgggaagtgaacccctctaagattttatttatttacttattttttgagacagagtattgctcttgtcacccaggctggagtgcagtggcatgatcttggttcactgcaacctctcactcctgggttcaagaaagtctcagcctcccaagtagctgggattacaggtgcgtgccaccatgcccggcaaatttttgtatttttagtagagacagggtttcaccatgttgcccaggctggtcttgaactcctgaccttgtgatctgcccgcctcagcctcccaaagtgctgggattacaggtgtgagccactgcgcctggcctcatttttgtatttttaatagagatggagttcatcatattggtcaggctggtctcgaactcctgaccttagttgatctgcccgctttggcctcccaaagttatgggattacaggcatgagccaccacgcctggccccctctaagatttttcataaaagttctagatccttcatggagaggggcatataaatatacatatccacacaaaacacgcacacatactcagtagttctcagtgaggagcagttttgcctcctgggggacatttggcaatgtctagaattttcattgtcgtgtgggtggtggggtgctactgtcatccacagggtagaggccagggatgctggcaggcatcctacagtgcccaggacaatgccacagcaaggaactgtctggcacaaaatgtcactagatctgaggctgagaaacacatacatcctcttgtgtacatacagcgtgtccaggggctttcatacctgcagaacaaaatactcatcacataatctgcaagagcaggatgctatgctgtacaattgtgcggtctctgttctcttgtacattcatacactgttgtgtttgggaggtctggaaggagaaaagtcaaggtgctagaggcagctgtcactcaacagtgagatgcacagactctgaagttagtctgcctgggttgtcctgtctctgccacttagctactgtatgatctggggcaacttatttagcctctttgtgtttcagttttgtctgtaaaacaaggataaaagttttcttcacgcagggttgttgtgaggattaaaaatcaaaacgtggcctgtcgtggtggctcgtgcctgtaatcccagcactttgggaggccaaggtgggcagatcacctgaggtcaggagttcaagactggcctgaccaacatggagaaaggagaaacccgtctctactaaaaaatacaaagttagctgggtctggttgcacgtacctgtaatcccagctacttgggaggctgaggcaggagaatcacttgaacccgcgaggcagaggttgcactgagccgagattgcaccattgcactccagcctaggcaacaagagcaaaaatccatctcaaaaaaaaaaagtcttaaaaaaaaaatcaaaatgtatgggaaagcttagagtggcacctggcaccaacatgagtaagtgcccgaggttcctgggctggcaggggatggaggggcagctcacctgtgttagggttctggtcatgggccagccagggaggagctctgactcctgctgcccgacatccaccatctggagagcttggcttgggcatgctctgcacctcagcctgccacgggacctgggacatcctcgtgggccccatctgtgaaatggggaatagctgtggtgaggctgggaccagtgcagatgtgtgagaactgcaggggaatttgggatgtgggggctacagcttgcatgtgatgggcacgctgagggatgggggtacctgggtgctgagggagacggggagcaggaggctgggctggtggggctccccatgccccttgtacctgcgtcagttccctgatctccccaaggcagttggggcttggaggagaaggggacatccagcagtttcccttccatcccagggtgtgaacttgtatgtgaagaatctggacgactccattgatgacgacaaactgaggaaagagttctctccctatggagtaattaccagtgcgaaggtgaggactgggggcacctccgggggacagcgttcccctccatcctctcaccaccatccccccacaaccccacccctccaccctctcgcccagcagccttcagggggttggtgccggctaccccttctggggctctgctgaccccgttggagcttgtagccatctgcagccttgtctgggctggaggggaagagggtagaaatatagtcccagtcacacagctggacttggggctcactgtcaccttggcatttattgagtgcctactgtatgccagattccagaaattcatatcttagtatttccattgacttttgttgtctggcctctgccagtgacattaccctcctgggcctccgttttcccatctggaaagtgagagggctggacttcgtcattcttcatttgttcttccctatttctggagcaccaattgtgtgcccaaccctgttaggcccctgagatgtggcaactggcccatcagcagctctatgagctttagcagatgttgtcttatagataaggacactgggctcactggatggctttccgaccctggcttctcattacaaccccctgggcaattcttaaatacacacacctcagtcaggcatagaatgtggatccccggggtagggcctgggctttttattttttttttttaaagctcccagaggctgggcaatatggctcacgcctgtaatcccagcactttgggaggctgaggcaggcagatcatgaggtcaggagatcgagaccatcctcgctaacacggtgaaaccccatctctactaaaaatacaaaaaattagccgggcatgatggcacgtgcctatagtcccaggtattccggaggctgaggcaggagaatggcatgaacccaggaggcggagcttgcagtgagccaagatcgtgccactgcactccagcctgggcaacagcgagactctgtctcaaaaaaaaaaaaaaaaaaaagcgcccagatggtttttaagatgatgatccagtgtttcttcattctatacttaaatacctgctgttttaccaggctctgtgggaaacaggagcaaatcagatgtgatccttgctttcaagtagcttatagtctagtgaggaagtcagcccgtcactaactcaaatggattataagatgggggacagtatgggaggcaaagctacaggagttcagtggaacagaagggaaggctgcctggaagaagtggcagtagcagcagtgtttgacttggctgtgaggaggtagggagctggagtgggaatgaggaattttccaaagagatcagtgtgagtgacaggatggggggacccgcctgaatgatgtgatgttgggttctgaggaagtggtctagaagttctcttttggctactgagtccagttgtaaacatccttcagggagccttgtgtttggaggaaaaaaggttgtcttttaggttaagatccttttgaaaaatgcgagagaaggctgtggcacatgtaaattaggcatcagtaaatttgattacacatcataaaaagctataggtcctctttccaagcaaatgcatatacatttgatgtagaaacatggttgaaagctggaattttaaagttaatcaggtttaaatgtaaaccccagtcctaccattacctagctgtagaaactgaggcaagtggctttgcttttcggaccttgtttactcacctataaagtgggagcaacatttctcacctctccaggtgtcctaagaactactaaagaggctgcatgtacagcatctgcattcaataagtagtgaaatagtgattgtcgtaatgattcatcatacaccttgcatacagcttcaggagatggaccttcttgaggactccccgaacaaaggaaatgtgtaaatttggattgcttagagttaaggcacacctggggtgaccatctttttaacaggacaaacggtataaaatggggattataaatatatctattttttgtgtgtgtgatggagtctagctctgttgcccaggctagagtgcagtggcgccatctcggctcactacaacctccgcctcccgggttcaagtgattcttctccctcagcctcctgagtagctgggattacaggcacctgccaccatgcccagctaatttttgtatttttagtagagacggggtttcactgtgttggccgggctggtctcaaactcctgacctagtaatccgcccgcctcagcctcccaaagtgctgcaattacaagaatgagccaccacgcccagcctacatatatatatatattatacaattatttatttattttgagatagagtttccttcttgtcgcccaggctggagtgcaatggcgcgatcttggctcactacaacttctgcctcccaggttcaagcaattctcctgcctcagccttctgagtagctgggattacaggcgcccgccaccaagccctactaatgtttgtatttttagtaaagatgaggtttcaccatgttagccaggatggtcctgaactcttgacctcaggtgatctgcccgccttggcctcccaaagtgctgagattataggcgtgaaccactgtgcctggcctatgttatgcgattttatatattttggtttattattattttttattagatgcaggttcttattctgttgcccaggctggagggccatgatgtgatcatggcacgccacaacctcaacctcctgggctcaagtgatcctcccacctgagcctcctaagtagctgggaccacaggcatgtgccaccatgcccagctgatttaaaaaaaaatttttttttggtagaaattgggagtcttgctgtgttgtccaggcttgtcttgaactcctgggctcaagcagtcctcctacctcagcctcccaaagtgctgggattataggcatgagccactgcatctggcctgtattttgttttatataaaaataattatgaaaattaaaggaattaatggatataaatacttataccactatcaagttcatggtaagctctgcataagtgttagctttgctaaattttatcattattaactaccgactgccagaagttcttaacaatatatatatatttttttttttttgagatggagttttgctcttgttgcccaggctagagtgcaatggtgcaatcttagctcactgtaacctttgcctcctgggttcaagtgattctcctgcttcagcctcctgagtagctgggattacaggcgcctctcaccatgcccagctaattttttgtatttttagtagagatggggtgtcactattttggccaggctggtctcgaacttctgacctcaggtgatccacctgcctcagcctcccaaagtgctaggattacaggcgtgagccactgtgcccggccctttggctatctgatgaagcctgtggaacccttctaagaatattttttaaaaacttttttgagacagagtctcgctctatcacccaggctggaatgcagtggtgccatcacagctcactgcagcctccaactcctggcctcaagtgatctcctgtctcagcctcccaagtagctgagactataggagcaccactatgcctggataattattttttatattacccaggctggtctcaaacccctgggctcaagcaattcttccgcctctgcttcccaaaaataggcatgagccaccaaacctggccctaagaatatttttaaatgcataaaataagattcttaggtgtacaaaaaaatcatactgaaaaaatataatggtcaaaatactaaagtgaaagcagtatgtgcttcttttattatttttatttttatttttttgagacgaagtcccactctgtcgcccagactggagcgcagtggcatgatcttggctcactacaacctctgcctcccaggttcaagaacctgggttctgcctcaacctcctgggaagctgagattacaggcacccgccaccataaccagctaatttttgtatatttttagtagagatggggtttcaccatgttggccaggctggtctcgaactcctgacctcaggtgatctgcccaccttggcctcccaaagtgctgggattacaggcataagccattgcgctcggctgagattagcaataattaatgtgatatgaaaatattttctttttcttcatgacaaattcatggctaatactgccaggatttttttgttgttgcccatattcataatagaaggaaatgctaatatgaaaataaagatgtcactttttccccaatccatgcaatttccccctaaattgtatccatgacctacctgagggggatccatggactctcaggttaagacccctctactgaagggtagcagagtacagtttcaaaattactgattaagagcgtgggctcaccaggagttcaagcccagccggggcaacaggatgagacctcatctttacaaaaaatgaacaaaattaggcatggtggtgcttgtctgcagtcccagctacttgggagactgagttgagaggatcacttgaggctgagaggttgagggtgcagttgagctgagattgcaccactgcactccagcctgagtgacagagtgagatcctgactcaaaaaaaaaaaaaaaaaaaaagaaaaaaaaaaaggaaaaaaagaagattttaaaaataactctagtccttatgggctgtatgagccaggccggtgtcttcaccctaaaaaaaggttaaaaacccagggccaggtgtggtggctcctgcctgtaatccctgcaccttgggagacctaggtaggaggatctcttgagaccagcctgggcaacatagtgattgctgatctctacaaacttaaaaaaaaaaattagctgggtgtggtggcatgtacctatagccctaactacttgagaggctgaggcaggaggatccctggagcccgggagtttgaggctgcagtgagctatgatcataccactgcactccagcctggatgacagagtgagaccccatctctttaaaaaacaaacaaataaacaaaaagacaaaccctaaatgccatgtgggttggatcctggaagagaaaaagaatattaggggaaaaaagagtgaaattccagtgaagtctggagttcagttaatagcattgtagttaataggagctaatggtataaaatagttaatagcattgcaccagtgttaattttgtagttttgaaaaatgtaccatgttcacattgggggaaactgggtgaaagatatacagcaggccaggcatggtggctcacgcctgtaatcccagcactttgggaggctgaggcaggcagatcacttgaggtcaggagtttgagaccagcctggccaacatggtgaaaccctctctctactgaaaatacaaaaattagccaggtgtggtggcacacgcctgtagtcccatctacccaggaggctaaggcaggagaattgcttgaacccgggaggctgaggttgcagttagccgagatcgtgccactccactctagcctgagtgacagagtgaaactatgtctcaaaaaaaaaaaaaaagatatatagcaaccctctgtactgtttttgtaactttttctgtaaatctaaagttactccaaagtaaaaaggttattttaacaaaaaggctaagaacctcttccccaaattcctaaagaacttggcttggtacttagcagaggcgatagaagcttaccagaacaatgtgttgggttgagtcctggctaacgtatgaaccacaggctgagtgaccccagacaagtcactctttcgagtctctcttatcccggctgtaaagtgggagccgcgatgcctcccgcatcgggaggttgtacatgtgaggtgtgaagacatgtaaagtatctggcatgcagcaggcctcatagatgggggtgcgtgctgcatccctcaaacagctcagtaaacagggtgcacgctacatccctccatcactcctcagtaaatgggggtgcacgctacatccctccatcacagcttgctaaacgggggtgcacactacatccctcgaacacagcttagtaaacaggggtgcacgctacatccctccatcacagctttctcgcgggcctgcccagtgctgggcttagcccatggggaggagggaggcagcgcagccccaggagccttccttccccaccccagcagctcttgtcttgtcttgcttttaggtgatgacagagggtggccacagcaaggggtttggctttgtgtgtttttcctccccagaagaggcgacaaaggccgtgacagagatgaacgggcgcatcgtgggcaccaagccactctacgtggcactggcccagcgcaaagaggagcggaaggccatcttgaccaaccagtacatgcagcgcctctccaccatgcggaccctgagcaaccccctcctgggctcctttcagcagccctccagctacttcctgcctgccatgccccaggtgacggcctgcccgcaactcccaccgcagccttcccccctgccccagcaaggcagagcatgaagactagagttctagggaaatggaggtttctaacttgcttctgccgaggactcattaggaagtctttgtttccctctctataaaagggagagatagtgttagtcaaatggcatttcccagtgagagaagctcgtgaatgttgtgctgaaaaagactcttaatgatccagcaagtttgggaaatgctgcgttaagcaagacctacatttttccttcctcccttccttcccttccctcccttccctcccttccctcccttcccttcccttcccttccctccctccctccctccctccctcccttccttccttccttccttcgtggggtctccatgtcacccaggctggtgagcaatggcgtgatcatggctccttccttcttccctcccttcctcccttcctcccttccttcacggggtctccatgtcacccaggctggagagcaatggcatgatcatggctcactgcagccttgaattcctgggcttgagtgatcctcccactgtagcctcctgagtaggtgggactacaggtgtgtgccaccatgcccagctaatttttttgtttattttaaagaaggggtctcgccatgttgcccaggctggtctcaaactcctgggctcaagcaattctcctgccttggcctcccaaagtgctggcattacaggagtaagccaccgtcccccgccctacatttttttaaaaattaaatttttatttttttggagacagagtcttgctctgttgcccagaatggagtgcagtgacaccatcttggctcgctgcaaactcttcctcctgggttcaagtgattcttgtgcctcagcctcccgggtagctgggattacaggtgcgtgccaccacactcagctaattttttgtatttttagtagagacggggtttcaccatgttggccaggctggtcttgaactcctgacctcaagtgatgtgccctccttgacctcctaaagtgctgggattacaggcatgagccaccatgatcggccctaaatttctttactatctacactattctaccctaagatgccaatgtctactgagactctccaaaacaggcacagattatccagcatttccccagcttagatggtcatttttttgtgggatgcctgttaacatctcccctggatgttaatgttctgaggagcatggtttgggaaaggacctcgtgggacttacaggaagtagaaagatgtcacccattaaaggccaccacggtaagaacattcctctccttttagcagttgcttaagctgcacaagttggagtaagatgtcaccctttttatccaggtcattgggttagctgacagggagccaagattgaaatctaagatctttgccctgcaggattcagggctaatggacatcctgagatgggaggaaggagctttcattacagccttgtgggtcttgactcaccagtccctgcaggagccagtggagttcctgccatggtgtccctgaggaggtgtagcttctcacctaccctgccgccaagcccctcagtctgggtcttcttttcccatgcagcctccagcccaggctgcatactatggctgtggcccagtgacacccacccagcctgcccccaggtggacatcccagccacctagaccttcctgtgagtgacccagccccttccactctcagactggcctattggtgtgggccccgtgaggcagtcataacacagggatgaaacctggctctgccacttcccaaggtgggtgacttcacttctctgagcctcagtttcctcttctgagcatgggcctgaatgagacgtgtgtaaagtaccaagcacagtggtgagccaatggaagacacgcagctagccaccagcagtcatcaccaaagatgcctctgatttgtgactctgaaaattcttgcaaagctgagaaggtgaaattcctctggctatattgttgaccaaaggccctcctctgtaagagtgaattgcacgctcacttgaaactatcttgagggactaaggtgtacaatcctggtgcttatgcagtttggggctctaggtagacacgagctggctttgaaattgtagattcctacactccccctttctggagttctgggtctaagtgaattgactcctatttctgttgtgaatgttgtagtttcccttcccattctcttggtggccctggaagcttctaggcacagtgtgccaccctgattattcccaccactccatccaacttttctctctctgtggtgtctgcaccacaagctgcctaccctccaggtgcctcaatggtccggccaccagttgtgcctcggcgccccccggcccacatcagcagtgtcaggcaggcctccacccaggtgccacgcacggtgcctcatacccagagagtaggtgagtgtgggtagggccaaggggaatgggggtggggcaaagttggcactaggagtcaggaccagcctccatggtgaccttgccatatgccctctcggtgagcaaagctgactttggagactgtagcgtggtagttagcttggcctccagttcctgggaccaactgactatgaggcccttgctgactactatatctgtcacctaatctttaaaatggggacaaaaatagtacccccattttattgtagagaatttaaatgtttttttttttctttttgaggcagaatttcattcttgttgcccaggctggagtgcaatggcatgatctctgctcactgcaacctccgcctcccaggttcaagcgattgtcctgcctcagcttcccaagtagctgggattgtaggcatgcgccaccatgcctgggtaattttgtgtttttagtagagacggggtttctccatgttggtcaggttggtcttgaactcctgatctcaggtgatccgcccacctcagcctcccaaagtgctgagattacaggcatgagccactgtgcccagccttaattttttttttttttttttttgagatcgagtcttgctctgtcgcccaggctggagagtaatggtgtgatctcggctcactgcaacctctgcctccggggttctaagcgattctcctgcctcagcctcctgagtagctgggattacaggcatgcgccaccatacttggctaatttttgtatttttagtagggacagggtttcaccatgttggccaggctggtctcgaactcctgaccttaggtgatccaccagcctcggcctcccaaagtgctgggattacaggcatgagccaccatgcccggcttgttgttgaggatcaatgagatcatgcatgaaagggcttagcactgggcctaaagcctggtaagtattgcagtgactataaacaagggtgtaggttttggctgtacagcaagcacatctgttctttcattctgcaaatgttctcacatccacagtgtgctggggccccaagctcagcactggaggttctgcgtgaacgaggtatactcagtctctggccttaggttgctgccaggccctgacacccctgcttattcctttttattgtggtaaaatacacataacaaaatttaccacttaactatttttcagtgtacagatcaatggcattaagtatattcacactgttgtgcactgtcaccaccatccactctccagaactctgttcagcttgtagagccgaaattctgtacccatcaaaccataacttctcgttcctcctcccgctagcccttggcaactgccattctactttgtctctgtgaatttgactgttcttgcttggtacctcatgtaagtagaatcatagagtatttgtctttttgtggctagtttttttactttacatgtctcaggatgtatctatgttgtggcgtgtgtcagaatctccttattaaggctaaataatattccattgtatgtatagacctcatttttacttattcattcatctatcaatggacacttttctaccctttgggtattgtgaataatgctgctgtgaaaatggttgtgcaggctgggcgtgatggcttacgcctgtaatcccagcactttgggaggctgaggcaggtggatcatgaggtcaggagttcgaaaccagcctgaccaacatggtgaaaccctgtctctactaaaaatacaaaaattagccggacgtggtggcatgtgcttgtaatcccagctacttggtaggctgagacaagagaattgattgaacccaggagggggaggttgcagtgagccgagataacaccactgcactatagcctgggtgacagagcaagactctgtctcaggaaaaaaaaaaaaaagaaagaaaatgtttgtacaaatagctctttgaaaccctgctttcaattcttttgggtatatacccagaggtaaaattgatggatgatatggtaattctgtttaactgtttgagaaagccctatactgtttttctgtagtggctacatcattttacattcctaccaacagtgcacagtcttctaatttctttacattcttgtcaacgcttgttattttctgttttggtgttgttttgttttgttttgtttttggatagcagctatttgaactctgctttttttgttttgttttgttttgttttgcagccaacattggtactcagaccacaggacccagtggggtaggatgctgtacaccaggccggccgctcctgccgtgcaaatgttcctcagcagcacatagcacctatcgggtaaggccagcccagctgcctgctcttagcctgggctcctggccgcctggctcagaaccttagctaaggtgttgggccttggctttttttcttttcttggcttgtaaagtttcgtttattaatgtgtacaatcaataagagatcacccttactgcgagaaggggaaagagggccagcattacgttttatttacaatttgttttgcttcggttattaccaaaattaatttggatatccttagtatttgtgatgaacaccaaggaaaggtattctaagaatatgctgattattgaagggatgtacttaatcttcaaaacagaaaatacttactgtaatcaaagactgtgtatttatctccctcccctaaaaaaggcctaaaattcagcattatcatatcctgtgtagaatttcaatgtgtctcttttgaactatttcctgcaaaatgaatgagaacagtctttaaacagcaaaaatgtctatttttttttttggacagggtcttttttttgacagcacccaggttagagtgcagtggtgtgatcatagctcactgcagccttgaactcctaggctcaagtgatcctcccacctcagcctccaagtacaggcatgtgacaccatgcctggttaattttgtgtatttttttgtagtgacaggggtctcattatgttgccaaggctgatctcaaactcctggcctcaagcgatcctcccactttggccttccaaagttctaggattataggtgtgagccaccacacctggccaaaatgttttaaaattaccaagatgtgaaagggtgagaggtgtgccggggacatgtccataaatctacttgataaaaagtgctttatttggcacaaagttattggtaacacagggctttcctttatcaacgttcatcagggacctttataagttcgtagcactacaggaaacgtctaagctagaggcatgactttgtcttctaatccactttgcccttgttggggactctccaccccacctgatcatccagaccttgccctctgttcccctcctccagtgcctccctggccttctgctcacttgccagggtaagtattttgaggacatgcctgtccatggtgattaagggatgtgtccccggcaccatgcaggtccaggagccggctgtgcacatcccaggacaggagcccctgaccgcgtccatgctggctgcggcgcccctgcatgagcaaaagcagatgattggtgagtggctggttctcctactgtggagcaagaagaggagggctgcgagctggctagcctgctgggaaacacctcacctggtggtccaacgtgaggtcaaattccagctttgtcaccgacccccctactgggtgaccgtggccaagctggctctattctctaggcacctgttatcttgtcttaaaacgctggtcagactggatggtcctgagctttcttccactgctgctgtcctgtgactttgaggttgggagacagtccagatgtggggagatcaggggacaaagggaggagtaggggtatggtcttgggtttctgctgagaaatggcttgtaggtggggggttaaagttcctcacacctctcctgaacgggaggaagctgctgttcaccagtttccagtgctcaatgcgggcaggtggggcatctgtgcgtttggtaaatacatgatgtttcccatagattctggattccttgtgcaattcatcttcacccctagtgtccatggcaggccctgataaaaatgccactaagtgaacacaagcttgttcctggttggcaggttctttactgcatggcccccgagacctccagaccctttactgaaggcccccattaccactgccccattgtttcctcagcttacttagggttttgccacattaccccttcccctcaccccgaaatttttttttttttccctgagatggagtcttgctctgctgccccggctggagtgcagtggcacgattttggctcactgcaacctccacctcccgggttcaagtgattctcctgcctcagccttctgagtagctgggcttacaggcacatgccaccatgaccagctaagttttgtatttttattagagatggggtttcaccatgttggccaggctggtttcaaactcctgatctcaggtgatccacccacctcagcctcccaaagtactgtgattacaggtgtgagccaccatgcctggcctcacccagaaacattttgaatgagcttaatggaagtagaagtctttgttagtagttctctgtaaacattttcactttcttcatgggacgatcctttccgcccccacttaaggcacccagtcctggctgggccctggacacattgctgagatgggctgaccaccaataccaggcccagtcattaaaagtacctgatgttagaagatcaagtgttaaatgtcatagcctagaaggagcagttctgggagaagaacccagatgtcctcagtgctccactccatacgagccctgggatgctggggtgtgagctaggccgtgcacaagccattagaaggtgttccacacaggggagcgtctctacccccttatccatgatgtccacacccagctggctggcaagatcacgggcatgctgctggagattgacaactcagagctgttgctcatgctggagtctccagaatccctccatgccaaggtaagcaggagcctgggcagcagggagcccgagggggcaggaggagagctaacgacaagggctctcctagtggagccagtggatagctgtttggccagataaagtgtttcttcttgctaatacctgaaggcctgctgaatcttaagagtggaaggggccttaggtaagggtttgctacttcagcccttccgtagactaattctgtgttgttctgtaggtaggtcttttggtacaaggaagtgtgttgtgactcagtgtaagggttaagatttttccagctgtccagcaatgtacctctgtgtcaaaggtgacagacagggccatgggatcttgcaagcagtggtggatgggagggttccacagaaaccctgtggatggaggaggatcctgtatccaggatggtgagcgagggggagatcaaggctcttctgtgacctgctaagatagctgcactaagcccccccgccactcatgtctcacagatagacgaggcagtggccgtgctgcaggcacaccaggctatggagcagccgaaggcgtacatgcactgaaaccaggtgggtggaatggtgacagaagcagctgagcccgggagaagctgtaaggaaataggcagggactgactttcacaaacactgagaattgcgccgtgttcctggctttctctgaagcaccaaagagtttggaggaagttgtgagaatcagaggagatgattaactgtgatcggaatggggggtggtggagggtgaaggaggtgccctcttgccagctgccctgcctggcttcatgcagaatagtttgggctttcccagggccctgcctggctccattctgcctgcctgaaggcctggccaggatgtaaccaccttctttattgaagactgggtgtctgccatactttaaaaacacttatttttacctttttgtcctcagaaaaggaaatcctcgcttccatggctgccaaaaggacagtgtttctggctctcagccctaaggccctgcaaactctaacttatttcccaattagtctgtatctatacttgggctctgtatgtgaatgaaggttggtcacccatccagcctattaccttttgctttgtgtattaaaagtgctgcaaaatctgccttgcctcccaggaggcccttttgtgtctgagggaggtggggacagagcaaacggtagacatgactggggtggggctcaggctctaagaaacagaaaccctaaaggagtgctgaagtacacagagggcatatacacaagagcaggagaagtgttaggaactgacccatcaacagtacagtggatgatgacatggatatcacacaatggaccagagctacaggggcccccatctgatgtgcatgcagcccctggcttgggcaccctgcagggcaaacacccagctgcttctcggctggctaaggggttgtgtaacataattaacccttgtaggaacgttttagggtaccttcccaggtcaggattttcctcccctaatggagaagtctctcgaaaagcttctttgtgtcagttagtgctcacctcccatcagggacgtacagtccaggtctttgccctctcgtgtaccggagcggcccagtgaaagtggctactatgacccaagcagactgggttctgctaaaaattcaccagcaacaaatctgaccgagtcctcaaggctgctctgccactctcagcaactcactcttcctgttctccgctccacagacctccaacctgtcttcaccatgtcctgcccacttctttggctgcttttaatctgttccctgtgcagctccatcgtcttctccccaaatcctgactgctggcatttctttactctcagtcctgggccctctcggtttctcatgccatgttctcctgagctatctaatttacaagcgcatcttccatttgtacccagtcgaggatgactccctgtttttttcttcagcccagtcaactcttaagagcacctgagtcacctctcttacattccaccgcctacctgccatcagctcctggttatcttggtaacactcatgtctaaattcaagcttatgatttaactaagtttctttctttttcattccttggttcttttttttttgagacggagtctcgctctgtcacccaggctggagtgcagtgacgtgacctctgctcactgcaacctccacctcctgggttcaagcagttcttttgcctcagcctccagagtagctgggactacaggtgcactccaccacacccagctaatttttgtatttttagtagagatgaggtttcaccatattggtcaggctgatctcgaactcctgacgtcaggtgatccacccgcctcgggtggggtttacaggcatgagccaccgtgcccggtcttattctctgattctctcttccagtgttctgtctccataaatggccccaccattctgttgcaaaagccaaaatcagagggtttccccagccctgctgccacaccactttctctcctcccctcttccagagaaaatccaccaacatgacctcctaccagatccaaatccactaccactacctagtggaataaatccactaatttgagctaagctcaacccctgcgctcactgccttctgccagttaactgcatttaccctggccctcccgcagtctgtcctccaccatgcagtcctaaggcttctttcaaaatgcctctctaatgtctcatccttgcataaatcctgcagtagcttcccatcattagaataaggactactttacacagcctaggagaccctgcatgatctgctctctgccctgtcattcccacgtaacggtgttttaccttctctgggagtcggggtagaattccatcatgaccattaagacagtcacattgatagctgtgtgtccctctcctagaaacattaacctatgagaagcagaagttttattcctcaaagcatctctggaaaagactgaatgatgttaaatttcaaagatgagtgatggggatgaggaagcttatgttgtgttcttcagacatttttgaagtacaaaatgagtagtctcttcgggttgtgccggccccaccctctgtgtcttcactagcaaatcaagttgcttgccttctagagctcagaatgatgtaaaccagttgtgactggatgtcacgaaacctgcctcacatcagtcctgcctgcttatgaggcaataaaaggggtacggtgccccactttgaaactgtcccttgactgtgccgatggggtttgtctgactctaactctgcttcagcctggatgtctgtgatggctcagacaacagactcatccttaagagagctcagaggtggtgtgcttaacgccgagtgctgcctagcactatgtgatgggagccaagggatgatcagacccctttgtctactctgctctgtggaatcctaaaactctacttccattaggtgaaaaccagcccaggaaagggaggcagcccttgattctagctagatcctagagcactctccagcctcaccccataccatgttttgtgaatttcatcagcccttttaggtccctgtactcactggctgtgctcccaatgagggccttacatggccgttctgtccacggtgtttccctcccctcttcactagttaacctccccatctggaactcaattcaagctttacttactcagggacccccttccctccactgcatcaaatttccccttttgggcagggaaatcactgacgactgcttcacaacactcaggcaagctgcaattttacatgtgtgtggttgtctgattaacttcttgccttcccactggactaccagccctctgagagcaggggctgtgtctattcactgctatctatctatctccctagcactattcacagtgcctggcccatgcagacatgtcaataaatttgttcaacaaatgaatgaatgcccaataagcaataacttttattattactacagagttccaggtgcaaagctgaaaaggcataaatgaaagcacagcagatattgatgtagaagaaagctttttaatgcaacagcttaaacacacagttcaacaaaatcagtcaattcaaattaacttcaacatattacaaagaactatgaagcccggagaaggccactgttggaacaaaaaaccaagtccctgcccagaaagcatggacactgaccaaggaggcctcttgccccctcccacctctaggaggagcagccacaatcactgggctctttaaacagcttaggtgcctctctgcagaaggcagcagcacagagtcaaggacaaccattcaagggtcagggctctgccttcccaccaaaggagggcccgaacagaaggcactggggctcagacataggagactgtgcaaggacaggacagggcagggacagcagctgtacacctggagagactgcagccctggagaaccagctcaacaggctgctttggatcagggccttaggtttatccccctccttccaccccggcccaggagctcaggttgttcagatgaactgcagtgagttggggtctggggaagctacaagggcagcactcagtctgcagcccacttgggcaggacaaagccaaatgctttgctgatgaggatctgttggtgtgatcagctagctgggctgggggaatagggacagagcttcagcttcacgcttagctctagtggggacctttctggtgcaacaaccatgtctgtgtttgactacactgagtttaatttgaacaagcaaagcctcttacagggtgggaggccatcaagggattgaggagggggcttcagagctcacttggggcatgctgggtttcaggagcgggcacagagcaggtggcccatggcttctctgggtaaggtcaggcaggggttccagttgccctgttgggtttttagtgtaggttctgcttcacttcctgccgcaacttctgtgcaggaccattcctaggctcaatctgtaggaggttgctgatgtctgcaaagctggatttatagtcctaatagaagaaaagacaggagtgtgggggaaggttcccggactggggtggggatagctgctgaggcagcaaagtgttttcaaaccccagcccacaggcctgctctgagttatcctgggcccaggatgagaaggaaaagctgcagatattgtctcagcttggctacaccctgtaaatggtgacactggcataaatctctgtagctatgttgggaccttttggccaggatttttttttaccttgagtgctttgtgggcttgagcccgtctgtagaatgccttcacgttctttccatccagcttgagggcttctgtgcagtccttcactgcttctgtgtactgcttcaggaccaaatagcagagtgctctgaagggaaagaccatttcagaggtttcagtcacgtcttatgggccacccacatgccacgcagtagtttgagaagtgatctccaatttgctgaacacctactctgtgctggttactttatgtcttcttaaatcctcacaacaatcctagcccttttcatggatgaaacatgctggctcagaagggtaaaggaacttgggccaggtaccgccagtattaaggggcagacccaggattcaaataggcgggcgttcgttcatgggactccagatcctgatctcatctagttctatcatgctgtactgcgctctcctatactgagctctttcaagcaaagaaaaggtttcctgaaacttttcccttgacagattaaaaaattatctactttaagggggaaaaaaaaacccaacaactactgaactctaatgatataatgctgacatggggtgaaatgtaaagacgtttgcaatttacttttaagtgcatcaaacacaataatacagaccaacagatggctaaatagtgataaggcaatgtaataatactaattgtagaatttagatggtaggtctatgggtgttcaatgtacaaatctttcaactttcctatattttgaacattttcataataaaatgttggaaaaaagttatgtgcatccatacaatatattctgcatctgtgggttcaaaaaagtgcatgtgtgtatatatcttcctcattcagatctagtccttctctccaaagacagtcactaaaaacaaaacagtcagatgtctgggcgctcattacataagttcatctgttccacctcactgttttcagtgggtgcagggtattcactaagttggatgtagcataatttattttaccaatttcctatcaagaggtatttttcattgtttccagtttgtaaataagtgatgccatgatgaacatccttgtgcaagggactgctgtatccaaagatacatgcattttaaaacctgactggccaggtgcagtggctcatgcttataatcccagcactttgggaggccaaggtgggaaggtcacttgagcccaggagtttgagaccagcctgggcaacatagggagaccccatctcttaaacaaaacaaaacaaaaaaagaaataaaatctgattgttactgccaaaatgctttccaaaaaagctgaatagttattgacagagcctattttcctacaactgtaccaactttgggtcttaaattttcatgtatgccaatatggaataaaacactatctcactgccttagctgcttagttgtgggtaaagctgaacatctttaataagggtttttaatcttttgaaatcaaacttctctaacttttcctttaacgacttctgtaacatttttttcccttcacataagaataccttccccactgcaagatagttaatccatgtgttcttctagaacttaatggtttcgctttttacattccaaactgtgatccactcagaacttactttaaaataagaagcaaggtaggattcaagtttaactctaacctggccaacccaacacctcttattaaataatctctctttgccccagactttattatacaccagattctctcatgtcgttgttctcatttttttctgacttatcatgaatttaaagaagaaaattctactagtcctttgtgattgcatggaattcataaattaacggagagaaaaatcttcttgtaacaacttaaaagacaggcacaaattctttggcaatcctccactgagaggcggaggtgtatctgctctctctctttgaattcgggcaggctctgtgactgctctgaccaacagaggacagaggaagggacacgatgtgacttccaaggttaggtcataataggccttgcagcttccaccttggtctctggaaacactcgctcttggagccttgaactgacagggaagaagccaactactctgaggccaccacgctctcaggaagctcacagcagcacacatgaaaaggctgctaagaaagtggaaagaggtgccagcttgctctagcagttccatcacccagccatttgagtcaggcagcccagctgccagacattcgaggaagaaggctttagaggattccagccccagctaccatcttgctgaccctgcatgagagaccccaaatgagaactgcccttccctaattcctgactccacaaattacaagcaaaataaaatggttgttgtaaatcaccaagttttagaatagtagcccgttttaaactttgaacacagaagaattcctttttttttttggagacagggtctcactctgtcacccaggctggagtgcagtggcatgataacagctcactgcaacctccgcctcctgggttcaagcgattctcctacttcagcctcccgagtagctgggattacaggtgcatgccaccatgcccagctaacttttgtattttttggtagagatggggtttcaccatgttggccagcctggtctcaaactcctaacctcaagcaatctgcccacctcagcctcccaaagtgctgggattacaggcatgagccacctctaaacatagaggaattctaaggaaattaaagtttcctcccaatgggcttggcaatttaaagaaatagccaagtgtctgggaagcagaggaaccaccgtgtatcgtgacttcagaatagaaatgtgattaatagggtcatgtgagacttctaaagactatatttaagatgaacaaaatgcataacttcaggcaataaaataaacccccttgacttttggtaaatgaagtaactgtatccagtcagaagggttttaattacaaaggggttgggaaataacacaagtgagtgaaagggaaataagctttggagtcacaaagatctggcttaaatctcagccaccatgtactagttgtttaactttgtggtcactaattcatctttctgagcctgattaggtaacacaggacaatgatctaagctgaagaactgttgtgagtacaagtgagattcttatgacagctgtttcagggctggcaagttgtaggtgctatgcactcagatgtcacctgcacaaagggagccaaagtaagccaaagcctgggcattgtgtcattcagatgggcgtacatgaggtggagcattagactatgtccaagacgttccaggacatgataaaatgttagccacaatggctgaaagttgttttgtcattagtcctctagattaaattataaatccaatgcaatcacaaccaaaagctgtccaacaagacattttttggaatttgccaaaatgatccgaagctttagctagaagaacaaacatgggaaaatactaggaatgctctgattaagaagaatgaagaaaagaccagccctataagatattataaagcaaaagcaattaaaacagtgtggcacagacacctgcatgaagaacagtatctaaacaagacaaaacacagctccaaatatggtaatgatccagaaaaatgagttaatggaggtgtccagcagcataaggtaagcaatgtgaaagagggtccagagatagaggagttagaagatgccacacaaatatggaacaaataggctgcaggcttctttttcaaattagcctggcaaattgtggcccctctggtccaatcagcaataaaaccacataaaaccacaggtgcaaaattccaaaatataagctttaaaactacaagttctctttccaactcattgggcagcaaaacctgatctgaactgacatgaagctatttagtttctctattccaccccatgtgaacatggaattttcaagtttcactggcagaaatactaataattaacttctgcaagctgccccagacactgctggggtgttacataattcagaccatattacctcactaaaatggaaaacacttcttttttttttgtgacagagtctcgctctgtcacccaggctggagtgcagtggcacaatcttggctcactgtaacctctgcctcctgggttcaagtgattctcctgcctcagcctcctgagtagctgagatcacaggcatgtgccacagcgcccagctgattttttgtatttttagtagagatggggttttgccgtgttggccaggctggtctcaaactcctgacctcaagtgatcctcccggagcctcagcctcccaaagtgttgggattacaggcattgagccaccgtggctggaaaacacattttatctcaagagtttggaataaggaacaatgtgtctatattagatccaagatttttgaactagagagtgatatgtgtatgctggtagggaaggataaacagatttctaacattttataatgttttatactaagcatttggttttgatatggtctcttgctgaatgtttcaagcttctgagagtaaaagtaacaggaagatcttgttgaagtcagattccaattcttgtgccaacatttactggctggctgagtttaaagcaaaacccttccttctctgagcctcaattttctaaacactaaaacagaaagaccacctatacgagcattgttggagaacaatcactcctacacagtgaagggaccgcaccctggctcccaggttctcagtcagtggtcactgacggcagctcctggtgcaggactttctacaggcccacaagtctaacctttcaggctagactgtacccatccttcctgctctcatgccaggcaatggttacttcacattttggcttctgggccagtactctcagacagaaatggtgccagaatttctaacaggagggtcttggagaagggtagggagcagcgtagcgtggtggggtggacaggctaagagacttgtgttagggttgtgtttgcagagcaggcacactgcttttagttacattgcatgcttatgaaaattctggggacaggggccaacaaagcccaggctaccatttggcatccctcagtttctacccttttgagagaatgaatgccactggtcatggctagctcacaacgtggatgcatgttttcagccataacatacttgactaaatgctagggatgaagggcccattgcagtccaagagaagactatggaacaaatgtcctgaaatgccccaggccagcagctgtataggagatacctgttgctgtacgtggcagattccaggttactacacaagaggctttcactgtacttctcaatagctttcttatggtttcccttctttacaagctcattgccttcttccttcagaactctggctttctccacatccccagcagaaggcactagatacaaattcagaagaggaaaaaaaccatggagcagcacccaactgagatcagtgaggtctcttcagcatcgtcccttccaaactgactacaatcctctctcccagagatttcctcccctgctgtaaatcatccttcctgattaatgacttcccccaattaatagcttctgggcaattcaacagtttttcatcaagaagttggggaatcctgatataaaaacatttttgcatgcacataaaaatatataaatgataaaaagcaacccaggttctagccttggcactgcctcttggtagctggaagatcttgtgtgacctacctaacttttggacctcaatttcctcaccaataaaatagggcaatactaattccacagatggctattttcagggtcaaatctgagagtatgtaagaaagtacggaacacactataaacttaaagcaggacaataagtaaataaatactaataaacaaatatctggtaaagaaaaggtatagcttctgggctatgagaaaaggggagaagagcctgctattcctcatttctggtttgggctgagcctgtgagtatcctccctcatctaacacatgcagctctgctccagccttcaaggagaggaagcagagggaacatggtgaaatccaagctgctcaacttggtgttcaggcccttcactgcttggccccaattaattattccagcctcagctccatatcatctgcttttcaaaaatttttaaaactatctttataaaatactaaatatttatgaccagggtaagattataggtttacaccctgaattcattgcctggtttaagaaaaagaacataactaggacctttgaagtcctgggggaccttcctcaattcaatccactgctggaggaaactattatccccaattctgtgcttcttccccacctttttaaacagtataactatatacaacagtacccacagatcatttgctgtttactttgtttttgaacttcatacagaagaataagtctgtgtattcttttatgacttggtttttctttttccccttaatgttatatttctgagattcatctgtgttgatgcacagacctgcagctccttcattttcattgctgcaataccaaagctgaattgtccattctcccatttatggagatctgggttatctccagttgttttttgctattacagtcttctacgaacatttgtgggtacatctccctgtgcacatgcacacaggtttctcttgaagtagggcttcagcttcactggcaccctgcaacacaccactctgcagtcatccttattcctactgttccccccatgcactttcattctccaactctctccactgtctctgccaaggattctccttccttcccacctgatgaccttcttcaaggtccagctcaaggctccacctccattgccaccccttctgagtctttccccgactccctcatgcacttaagtcagtttctatcctgaagtcctcaaacactaagactctaaagcacatgttcctcctccttgtgttttaagacactgtttacatgtctcagtccctcaactgagggagagttccctgagggccaagactgtcctctgtgtcacactgcttagcatacacatggcttggaacacatggctcagtgaccctgaaagaatgaaatcaatggtaggtgcactgatttaaagaatgaaatcaatggtaggtgcactgattgaaagaatgaaatcaatggcactgatgccatcaggttcattagcaccgcacattttcatcctagagaagagtggggaacacttaccaggctcccacaaaccagagtgaatgctacccatgaccagagaggcattctcctgtagaaggtgagtaactcttgtcctcccctaacacctataggtcacttacacatggcagggctccatctctgatcccttctgcacctctagcctgaatccctagcttgctgggctgggaccattcccctggagcattaaaagagcttcctagtgcctgacaaatggcctcttcatttcatacagttgaggtgaggaatctcctgtttttggctgcttggatctcctttctcttcttcatgcttctccagggattcacacagtgtacatgctcctgggaagcatcaccctctagttctggaggtggggcaggtgcctcagggtgacctaatcacaaaatctcatccgccggttatggtgtgtacttcagggaatggcctgtgaccatgaagaccagaatagattgagaaaatgattgagaaaatatgtgagctagagttttttgggggaaaaaaatcctatcttttcctagtgagctatcagagaaagactttctttctctgggtcatgaggcatggggtatggatgtgaggccgggaactgctatagctattttgctactaggagggaagcttgccaaagacaaagctgacgcacaacagaaaataaagctgtgataagtacagaaaaatggagttagtctgttaatatactgagctgctggagcaaaccttgcctgaattctctcggatttttcagttttatgagccaataaattccctatactatgtttaccatgttgagctttctgtttttgcaaccaaaaacatcctaagtactacatcccaagtgctaccagaggaaagagaagggaactcacactgcatgcctatgtgccaggctgggagttttacatgtcttatgtcattcagtcctcatggttgtgaggaagactttatcatcaccctcactatacagctgagaaaacagtctctaagaggtgaagacttgtattttgttttatactttgttcctaagattatttttataactcagctaaacaatgccaatttttgcaggactactctaaagaaaatggatagtgggagattgcaagactctgggcagggagtcacagctcacctctgttctttgtagctgtggtttctttggatttgcttttagccatctctttgtggttctccgaaggcaaggaattccacctcttctgagctgaaacaggcaccaaggggattgagggcagcttcaggcgccactcaggcccaagcgagtccatgagagctctggtcattctggaaaagaaggcaggattgcagggaggtttccagctgggtcaagaagatatttctcctttcacacacccatgggaggtaggccttttcagaagagccagagctgccaccctccccctggtcggaaccacctctttagctcctccaacacgtgcaatacaggaacccataaacaccatctcagatcagtccccatgacattccttgagcttggtcaaactatgttacctttaaagtggtgatctgttgcttgttaaggatacttaaaccatgatccaaaaagactatagtttctccaagaaagaatcatacattttgtttcatattttatcaatgaatcaagtacacaaccatgcaagcacctgacatttgtttaatgctcaggctttttaaaaaatgcaaagcttatgtcattctcaaatcttacaactcctcaggggttcccaattccctaggctaatgtggcatgtgagatctggtccccaccccttcctgtcccccttcactgtgagccacattctcttctgatccttctgttcaagactttgcacatgctttttcctctacccagaacaaccattttcattttggaaaaagattgccaccttccaggcccggctaactccaacttattctttagatttcagcttaaaatgccacccagagaccaagttcattctgtcaactgatctccagcacctggtatgtcacctagcaaccaccaaggcccaatcagttatgtgttgaatgagtgaataatgctaactgtatactttttctgctcctacaaccatgtttcctatattacaagaataaaaaccacagactgtatcactacaaattccaagatgtctctggctaggctgttttcctggcggccaagctatttcaaacctctgctctcctcaaacctgttccctggcccttccccttttttagagcaaacttcctcataccccaaatacaaacctacctgcctgggtgcccaatccttcctatttctctcctgtcacaacagaagagacaatgggaccaatccacccacctaagctctggatcccatctcctcttgcctctttcagggaccacacccaggcagcacctccctctcccacatcttcatccttcctctctactaactccaaccgtcagcatttaagtccctttaactctttcctcacctaataaaaccatactggacaccccttgccatcacaggtatactccccagcttctcttcaagcctgactttctgaaagcattgccctctggctcctgatcccactgaccagcttccatcagagccaccggtgacttcattgccaaacctttaatgtaagctccttggaacacctgacactaatgatgtctccatctttcttgaaatactccttcccttgggacatcaatgccctgtttcctcccacctctctagctgctgttcctctgtaagtccctcaaatgctggagtttctcaaagctccatcctcttcacactagctgtgatgttctttttctttctcacagccctaatccacctctgcgctgatgaccctcaaatccttatgtctggcctgtattttcttcctttgttccatgtaaatacccaaccgtcctacttagatctctagtcttatgtcccacagtcacctccgactgaatgtcaataatctgagtgtcttcttctattcctcccttctcgataccccgcaaccactaaagcttgttgatatacttcctacatgtcccctgactggtcccattgttttctctccaccctctcccctggattgctgcatgactcctttctattctgttgcccttcatatcatccctcaacatggcagcaaagagcttttctctaaaatacaaatctgctcatgttgctccactgctaaagaccttttcataaaggctgacttgctcaggattaagtccaagccctgaaccctgggtcttgtgtgacttggcctcaccaacctgtcccaagctgagctcctgcctgcagcaccatgtgaaaccgacttcttacaattcctgtgatctgtcacacttgctcacctttgcacacgctgctctgtcttctggctaaccccctaccccatatctctcattcttagctcacctcctctgaaaagctctctctggcctccccctctccctctcagctagctaggtggctcctttctggcctcagagccccctgtgctgcctcctaccatggcgcttatcatgttgtattgtgcttgcctattactgactggtgtcttccttgagaccgggacctctatgacggcaggaagaggtatgtctcagtcatcagcccaggtcctagagcaaagtctgtcacataattggtagattttgtggaatcagataagttaaaaaggaggcaaagagaaaacaaagaatgctggcagacaagtcaagccagaaataaagcactaaatacataccatgaagtccctgttaagggtttgctattagtgcagtgtttggctttctagccgcacacgcagaggggaaacatgatcagttatacaaatgacaatatccatgagataaaagccaataactgctcagagaccagaaaggaattgcacctggggaacctcttggattggtcacagtgcaatatactgaaccatgtccacaaaccatatccttttaggcttgtcatagctgcttgggcttgtgtcttattcttctaattagcgttagcgctttgaaggtaagtggggtctgtatctctttctcattttggtatcccccactgaaccgggcacaacaccttaaacagtgtacaataaatattactgtgtacatagatactgtgaggcacatgtaggcaaatatcaatcaatcaatcttagtaattgactccctgaaaacctgctaaataaaaaagcagattttcctttctcagcttcccctacatgcccatcgggagttttttaagtgtagccaaagggatcccctcagaagacagacaaggcaatggcccgcagccaatcaagaaggacagggagttgccgtggagaccacctgctgggaatggagctcacctgttgatgccttctacggctgacgtcacattatcatcaatctgcagcacagtcttatagtcaacataggccatagggtacttctccagagcctcataagcagatgctcgccgcagcaggggcttaatgctgaagggaaccaaggccagtgctctagaataggaggcaaaaatgtcaactggctggctgctgagccaccagggtttccctacagtttcttccaggcagggttatctggagcactcagcgtacaggaagtaatttctggccgagagacatggctaaaaacgccaaacctcagaacagggatttttcaacgtagactgaagtgaggaggagaaagaaggcagagaaacatgaattttgttaaatgtgtgtgcacatgcatcaattttcatagtttcagttcccccaaaatcaagaacaaaagcctcatggctttcatgctactatgtttttttacagttgtggtctagtgggaataacaaacaagctttggagtcagatggggtggtgtctgaattccacctctgctgctaactatgtgacccaggtaaatcactttactgccccaaccctcagcaaccaagttctggcctgggacacatggtaaccgtaccccacagattggttgtgaacactcaaagagggaaatctggcacaaggcatggcacaaattaattcagcacaggctctgtgagtatgctcacacccctcctgctctcctggctatcaccagggcaggaatctaaagcaatgtcagaggacatcagatctgagaacacatttcaggtaaatgtgagagtttaatgatgataaaagaatattagactggcttgaagaaaaagagatatgaaacattgttcagtgtcctctaaaactggtcattcatgaataccatttttttcctttctccttctgagacaatctattaacctctattcctccttctttccttcgctcccttcccctcacatactcccatcccagaaaagcacctgggcaagccagttactggtctgccactccaccttattcccaggtttcaaattgcacaaagactttacggcctgcttctaactgcccatcccactcctttttcggcagcagagccaagactccaaagatgcaagtcacgggccataaggaccaaataaagactcccattctcagtgacctggtgaaactcagtgacactttcttaatatctgtcccagatgtaattgatgggatccttccaaagaagaaacaagccagattaacccagcctcctcttctgagaccctcaggcatcccaaaattacccttggccacttacgaagtgcaatctttgatgcagtctctgcagtttccatccttcaagtgacatgctgctcggttggagtagagaacactttcttcttctgggtctgaagaacctgcccagatagagtggggaagatgatcagtttggaaaatgggtgcctcagggcattaggatacatttcaaactcagagctctttgggccttgtgttaaggcagtagagataactataacctgttcaggcttgttggtctgctgggctggcgtgtttgtcattcttatgtgacagaaggacactgcgctttttgccattcaaagggaaccaagtatttcctcattcactcattccagcactgaacttgataacagacaaaagataaacaagaaatagctagcttctgcctcaaagaaatccatgctgtaactacttgggtttgggtggataaatggatggataggtgtgtattttattacaaaaagcatttaaatccaagaaagaaagaaaaaaaaaaaaagaaaagaaagggagggagggagggaacaagatgataaacgtatgataaatggattgaccaaaagttgtaggggcacaaaacacccatgaaagacatgagactagttttacctggtcaagccagggaggactttgtcagggaaatgataattgagctgggtgtgatgggagtacagagaacttaatcaggaaaaagtcttaagctaccccatggggagaattattagacattcttctaaggcagtccttaccctcaggaatcgcagaggctcaagtccttcactgtggccaccatgatctttatttacgtatttttttttgagacagagtcctgctctgttgcccagcctggagtgcagtggagcgatctccgctcactgcaactccacctcctgggttcaagcaattctcctgcctcagcctcagcctcctgagtagctgggattacaggcactcgccaccacgcctggtagagacagggtttcactatgttggccaagctggtcttgaactcctgacctcaggcaatccgcctgcctcggcctcccaaagtactgggattacagacgtgagccaccgtgcccaaccaacaatgatctttatttttaaagataattttcaaccacttcatacccactagtgtcggccattattttaaaaagaattgaaaacagggtctctttttgaaaattttgaaacatacagaagaccattatctcagaatccaccactagatttagcacgttatattagttcccaacttttttaatttttagagacagcgtctccctctgttgcccaggctgaagtgtagtagcacaatcatagctcactgcagcctcaaactcttgggctcaagtgatcttcccagctcagcctaccaagcagataggactacaggtgtgtacccccaagcccagttaatttttaaagtttttgtagagacagagtcccactgtgttgcccaggttggtcttgaatgcctagcctcaagtgatcctcccgctttggcctcccaaagtgttgggattataggcatgagctatggcacccaacccttaaaaatttttttgataagctaaaactccagccatccccatccttatccctgtgctccctccccagactcacagaggccagtacaatcctgaagttggtatgtaacattttcaagcatgttctacatttacatatatatgtatatatgtatatgtatatatgtatacatgtacatgtatatatatgtatatgtatatatatgtgtgtgtgtgtgtgtgtgttaacaggaaagataccattttatgtctattaaagcatttcctaagaggcatcatattgcctatccttctgcaacttacttttttcactcagtatcctgttgccatgttgatatttgatatctttcattcaataccaacaataacaagcgttttcccctcttgttttgccaggcccagagacggaaagtacaaagactagtaaaatacatccttgcccttaaggagctaagtacccaaaacctgtaatccatcttgagtcaccagagtacggttgctcagaaacagcagtggtgcggtggaaagggcatcaaccctgcgatccggacaagtcactccatccctctgatcatgcgtgcccacctaccacatgaggatatcacttcatagacttgctggaagggttcattgtgttagcctgttccctgagctctcttcgtgatcaagaagactgatcagataaatcaagagacttgcccaaaattacctaggaaatctgtagcagcagcagaaccaaactccggtccttgctaaatctagataccaggctagcttttctatggacccagaattaacccatacaaatgtacaagcttttccagaccagctggggtgagatgaatgaaaatggcagcaacatcaatacctcagcttcttcagcaacttcatcaagtaaggctgccatgaggaagtgggcctaaaggagagttttctagaacaaagaagggggcaaaggagtggcttgaaactgcaaaaagtgcagacaaaaaaaaaaaaaaaaagaatgaaatctggagaggatgtgaggagaggtctagcaaaatgattaaaaatttggacttagcatcaaagtcaaacagatccatattcaaatcgtggctcttccatgtcttcactatgtaaccccgagggagccaatttaactctcttggactcctcctttctaagcattttatccacagggccataataaagatcaaaggagatcgtgtctaaaatgtctagcacatggtaaatcactcaagagatgctagccaagaaaaggaaaaaaaggaaggcggcaaagggaaataggtactgaacggtgactcacagaaaccaggatccaaggctcctttcaaaagtcaaggctttaaccaatgagggtttctgattaagtcaccctggagaaggggctttgggcaaaggtctgcggtatgctgacgaaagctggacgctgggagaactggtaagaatatgctattcttctgtttcaaactctccagtagcttcccatccagcagctttcatgccaagcttccagtttggcatgaaatccgaactccttagcagagtttacaacacctccacaataaataagggtctgccttcctaactgacctcatgtcttcctattccctgccctggctcactatgctttgacccctgaaacacaccatgtttatatcgtcttggagggggggcctttctcattgcagttcacttcaggaccgaaaaccttgtgcgcttggcttctcatcatttagacatcacctcaaatatcacttctttacagatgttgcccttgatctcccactccagtcaactctatcacatcaccctatttgtcttcttcctaaccctgattatcccacaggtctcgtttacttactgactcgcttaagactcacgtcctccccaccgcccccacaagaatgcgctgtccttgagagaagggactttttgtgtcttgttacacaggcggtatataacagctactcaacaaatactaactgaaaaatgaattgctgcgggggaggagggtttagctttcttctcagggctcagaacgaggcctaaataacttaggatgggggccaacagggcagttaacaagcaggtggaaagaaagggccgaggaagtttctggtaggatgccggagtcggaaggggctggaagggtgggagggccgggcaggactgctggccgccgcgcgaggcccgggcggtggttgcgggagttggaggagcaggcccggaggtgagatgggggccggggtcgtaccttgcgcctgcagcacccgcagcgcgcggccgtagagcgcggaggcctcggcgtactggccgttgcggaaactctcattgccggcggcgcggagctcctccacagagtctgggaatttgggggccatcccgtggccaggccggcgagttgggagctccttccttcctcccccgtgtggtgcggcacaccttccgggcgcaagcgccggcggcgaatatctccgcccaacagcgaacccgcggcgagggggcggggcctgcgagacctggaggcccggagcgtcccgccctctgcgcgtgctcggtttggaacttaggctcccttgcacgcggggcggcagcatgctctgggctccctgagttgctagaacgccgtggatgacgcagggaaggaggctggccccgctatcagggagattatgtcctagtggggtccccacaggcaattaactgataagcaaacgaagactctcatttcatgtgattagtgctgtaaggaaaacaaaacaggataatgcaatggaaagtgaccacgtgtgggctattttaaataaggggatgaaggaaggcctttctcagggggtaatagttgagctgagaccagacaagatttagggaatgctgttccagccagagggatggtaagtgcaaaggttccaaggctagaaagtacctggtacctagtgctctatagatatttatttaataaattaatgcacaggtggattgatggtgtcaaagtcaacatatagagatgaatctctaaagtttaaatattttatttggcaatcaagaattgcaattcagggcttacacacagaccaggttgtctttggtatgtcagaagaacaaagagaaggtttggagatttttataaaacagaaatgttacatattgctcttcaaggaagtttacaggcactagtaaagtgggggtttatcagcttcttggggagctggcaagctttgattggtaagtgatagtggtggataaaactcagaattgtagcaggctgtttcagtagctattagataaaactggttttaggttacagcaggcagttttagcagccaggcttgcaaaaaattacttttttggagcaatgttatatgccctgagtatttgttcccctggcttttcaattctgtcttagttggatatgacaagaatgacccaattcgtatgatcagctttcagaatggatgaagatctttcacagagtgtgacttcaatttatctccagcctcatctgacgactctatgtcccacgcattgctatctacacacactaaattcttgcttcctagcctttgcttgttatctccttctcctggatttttttttctaaatactttttctcctgcctaatcctgaattaacttataacattccattcaaacatcatcttctctgaaagcctttcctgcttccagccccctccccaccccccactatgctccctttgctccctattggtctctagctttatccctaactttgcattagtcaccctttgattgccagtttgtagttttccttaaacactgcgaggtctttaatggcaggaagtgggtcctttttatctttgtttatccaagaccctaatagggtctggcatccaataaaagtcattgattgataaagatctagtctctaccttcaggaattcagttataatgatctgcatacacttaactccaccagactataagctttctgagggctggatggctgttccatctgaaatgcttccccttgccctctgccccgaccaaggatgaacactgactgtggtgggaaaaccagatgaggcccatgctgctggctggctactcagtgacttccatctttgcttccaggagcctgaattttgcctgagactctcccagcctggggaagtgaatcaggattgctctaagccaattagaaaaatgtcattttctcttgccagtgattcatcaagggatgcacatgtgatgctgatctgggcaatgagataaaagggagtctgaggctggtcgcagtggctcacatctgtagtcctagcactttgggaggccgaggcgggtggatcacaaggcaggaaatcgagaccatcctggctaacacagtgaaaccccatctctactaataatacaaaaaattagctggggtggtggcacgcacctgtagtcccagctactcaggaggctgaggcaggagaatagcttgaacccgggaggtggaggttgcagtgagctgagattgcactgctgcactccagcctgggcgacagagcaacactccgtctcaaaaaaaaaaaaaaaaaaaaaaaagagtctgctgagtgtttatgggaaaggtttccctccccataacagagaggtactgggtcaagtagccattcttgctctttttctgctttgggtagtgctgggttaaggatatgatacctggaggtgtggcagtcattttgcaaccatgaggcaataaacacaagtatgaaaagccaacatgctgagtaggatgggaggggaaaaaatgaaatagatattgctgagtcattgaatcaactgctgacttattagcttattaataaacaataaaggcaaggtgtggtggctcacagctgtaatcccagctctttgggaggccgaggtggacggatcacttgaagtcaggagtttgagaccaacctggccaacatggtgaaaccccatctctactaaaaatacaaacagtagctgggcgtggtggcatgcgcctgtaatcccagctactcaggaggctgaggcaggagaattgcttgaatccagtgagcccagatcactgggctgctgtggtccatcctgggcaatacggcgagactctgtctcaaaacaaacagtaaatgccatggtgctttaagccaacatttagatgttttcacttgcttgcagctgaatatttcctgagtggtttatcggataagtgtagctgtggcaaattttattttccaaaaatggccccaataatatttctggttccccaagctcttccagacccttgccactgccctatgaggaggtggagtctgcatcccttctccttgaaactgggtgggcctttgtggcccccctccacagtggtaatgacattaagtatcttccactaaaaggcactgcagcatcccacttggctctccctcgggaacatgctttagaacccaggctttattttgtgaggaagctcaagaaaaatggagacgcccctagccttcagacccaagtgagcttccagccaacagctagcaccaacctgtcagctgtgtgaaatgccttttggacagggctgattgatcctgattgacaccataaacagagatgagccttcctgctgagccatgctcaaattgtagatttctgagaagaaaaaaagactgttgttctatgcctataaactttggggtggtttcttacacagcagtcaatacctggaaatcccttcctgcagtgcttcctataaatgccaggactgataaaaacagtactgaaataatttgaaggagggacagatgagagggtcaggggagggacaagggaacagagaagtcttctgggaagaggtgtctttttttgtaaaatagctttattgagatataactcacatattgaaagtgtacaattcaatgccttttagtatattcagagttgtataaccattactacaaccaattttagaacattttcatcaccccaaaatgaaatctcacaccttttaatcatcccctccaattcacctatgctcccttccaccagggccttagacaaccacaaatccaccacaggatttgcctattctgaacatctccaaacctgccaaagctatgccattaaaaggcactacagcaaagagcatcatgcaacttgcatcacactgggggcctggcacagaagtggcggtggtggcaccaggcagggcctgatccacggggtccagggtgaccatgtgggtcatgcaaatggcattacacaaatatgccatgcttggctaagttttttgtagaaaaggggtttcaccatattgcccaggctggtctcgaactcctgttctgccttggcctccaaaagtgctgggattacaggtgcaagccatcatacccagtcccttgaatactgttatgcaattgttccccattttctgccaggtgttggtttgaggatctattaggatactaaaatgtgagtatactcatgtactatagttgaccctgcagaacctatggaaacgaaaagtcagcccaccctatacacaggtttcacatcccatactgtattttccaaccatgtttcattgtggatgtggaaccctctgatagagagggctgactgtatttattgaaaacaaaacaaaacaaaacaagggttgtattggtggacccatgcagctcaaacccttgttgttcccaggtcaactgtatatccagagcttataggaaaatacctctcccagtaaccctgctcaccatttctctcttaagctattattatgattagccacggtttgctatttaaatttaaatttaaataaaaatgtggcctttcagttatgctagccacatttaaagtgctcaatagccatatgtggctaatggttactatttcggacagcacatatttagaacattcccatcatttcagaaattttcattgggaacactctgcggaaaaagggggccatcataatgtgagtccatcttctggaaaaatcctgggaaggggacaaaggaggtctgtttggcattgtgtaatggtaatttggtatttaattttcaaaaatgtttacccaattcctattcatcagccaggtgtggtggctcttgcctgtaatcccagcactctgggaggccgaggtgggaggactgctgcagcccaggagtttgagaccagcctgggtaataatagggagatcctgtttctacaaaacaccaaaaacaaaacaacaactttgatgttgtggagtcaggacagtcctgggttaaaacctttgctctccttagctgtgtaaaccgtgggtctcagctttcttatctgttaacggtaggtacttcttcctagggctgttttgaggattaagtgaaagtccaagattgtgtctggcacacagtagcttctcagcaaatgttttcctcctatgtcagggaatggctcctttatcccgttttgggcccatgggtggccctgaagggtgggtgctcaggtgttaagttctgtagatggcatatccttgggaaaagcaaggcaattaaaaacagtgagaggttgctctggttaagttttctcctataactttccccatgggtcaattgggtagaatctgccattttcctaatacttactgatggtagtggcattcggaagcacaatagctgaagccggagctctgagtggagagaaaggtctgtttctcaggcccaaaaagaggttacacacccatggctgtccagtttggtggtgcaggccctgaaatcagaccaaactggatttaaatccccaaacctatactctaagctatgtgaccttgggctagatacttcacctctctggccttatgaagtaggaataataataataccgtctaggttgttaggagtattaaatgaggtaaagcactgaaaacgtttagggactgtgttaaatcattaaataaataaaaacggggatgaccttatcggcttgacacaggggattaaatgagataatatatgaagacaagtacacggcaaatgcttaattaatgttgcttatttttatgtctgcaaactgacttaaaggggaggcctttaagaaagacagtggggcaatttgcgcgttgatgcattgtaggagaaaatgtgcagggggcccgttgggaccagagttcaaccaggtaagcggcagaaaaccacaaatacctccaggcgttcctggggcagcgccgcctccccaaaatcacgcaaaacttggtttgctaagaattgtcagctcttctaaaggaggcgcttcacgcatctcagtctgtgaaatgggacccaggacccaggtagaggtgcgttctcggcctggggaccgagtattttgtgcgctccggtaacgcaggaagacagcgccactgacactctagagaccagcgggcaccgcctggaggcgccttcaccacttggcggttccgggtccgcgccccaccgcgccacaagactcacgcccgaaccacgtgatcagggccgtggctccgccccgctcccgcgccgcgcgccgcttccggtaggggcggaaagcggaagtgtgggagggtctgcggggcgggctcaggaggtccgcgggaggatggagcagtgagcgggtctgggcggctgctggcagcgccatggagacggtacagctgaggaacccgccgcgccggtgaggggccactggctaagaggacgggcatggggtcaggggaagaaaaggcgggaactggttgaggggatacacctgtgtgggagtccccggagctaagcgacccagccgatggggcacctgctgagtgaggggggggacgtctggtgggtgagggtccggctgaggggagcatctgctaaggaggttagacttgggaccggttagagggagcactcgctgtggtgagactgtgctgaggaacgtggggacaagttagggagagtacctgctgaggccgggccactcgggggaacgctatccaagcagggactcacggaggtgggggcgaatgctgaagcagggtgagaatctgtgagggatctctttaagggggtggatcgagaactggccaagaggaaggccgggtggactttctaagggtctgaagtcccacttgaggggtgcggtggggggatctgtggaggggaaaagctttgcgcctaaggctgaaagcatgcgaggaaaggttgagggtctagcaagggaggggatggtggagggtagcatttcagaggatgctgttggtggtgtccccactgtaggatggcatcttttattactgatgttcagtgtcttcctaatggtcttcacatcctcctcagctcttcagaacctgacattgggaggtaggtaaggaaataagaggatattttcgagatggggagactgaggtccagagtagttgggaagtgtttccttctttactccgggtcactgaaccctgccagtctgtgcccttttcaggcctcagttgttttgtgaatatcagcaccaaatcctagtggtacctggaattgctttagttcaagatcaggatggtggctgatcctagaaaatctcaactcctggatttcccttgtggacatcccgggtcttttgccactctaccacatctggagaaaagtagggactagagaccgaaggagtcatgcttctctgaggttcagtgtggttacttctatttcacagagacgtctgacttcctgcagcagaatgagctctaaagaaggaagtgttcagggtgtggaagtgcagggcaaccaagaggtgaagagaagggattgactgcctgggcagcactcttaggggttgtttgagcttggggatgtttgaggtgcacaaacattgcagaaggcaaataggtggttgggatgggctttggattcaccctagcgtagtgtgctgagactgtaatagtaatgattattacactcatattgcacttaccgggtgccaggcactgttctaagtgctttccatgtgtcctgctgaagcatatgaaattgctgatatttgaccatttttgaaccataaaaacctcatttgaactcatttgaacctcacaacaatcctgtgtggtagatatccctatatgtctgttttacagatgataaaactgagatacagagggtagtgatttgctgggagaagtcatagcaagtaagagacagagctaggattttaatgtctatggggtctggtccaaagtccatgttctttttttttttttgagacggagtctcactctgtcgcccagtctgaagtgcagtggcgcaatctcggctcactgctacttccgccttctgggttcaagcgattctcctgcctcagcctcctgtgtaactgggaccacaggtgcgtgccaccacgcctggctaattttttgtagttttagtagagacggggtttcaccgtgttagccaggatggtctctatctcctgacctcgtgatccgcccaccttggcttctcaaagtggtgggattacaggcgtgagccaccgggcccggccatgctcttaactgcctcactctgatgcctctctaaaagtacccctgtttcacaggtctctgtgtatgttagcagatatttactatagtaccatagtgatccaattatgaatgcacactagttatgtttctttctgaactatgttcgttcgttcttcttggtttctttctccgaggccttggtttaattgaaaagaggattaggaatctgagttttgtttccccctttgccttgtcttacataatcttgagcaaaggactaaagtttcttggcatgctcattcctgtaccttttggattttaaaaaatgtattaaaagcacaagagaagagcattgcaggactgggttctgaagtggctggtgattcccagctcattgtaactagtagattgcctaatttgaagcagatcaattttattatcacgtgtatcagtttatcaggacaagacaaagtgtcatggagtgggtggtttaagcaacgtaaatttattctctcactgttctgaaggctagagatctgaaatcaaggcattgtcagagttgtttcttttgacgcctttgcttgactcgtagatggccatctccctgtgtctccatgttcttccttctgtacctgtcagtgtcctaatctcctcttataaggacaccagtcatactggattagggcatgcccatatgacctcattttatcttaattacctctttaaaggccttgtctccaaatacagtcacattcttaggtggtgggtattaggacttcagcatatgaattggggtaagctggggacacagttttattatgtaagattttgtccatttatcatgtatagttgttgtaatccatatcaaattctgtgtggaaaaagaaatagttacacataaaatgaactttatgggagttctgaaatgggagaaagctttgagaattagccagacctgtaagtgactacttcatagacaccattacttgtgtttggaaagatacaggtgtcttttcagaaattcagatggcatgtgtttccaataaccccagtgcaggaaatgccctttgtgttcgtgagtttgacatttgtgtgtgtgtgtgattaagtgatgacagattggtgtctcatataggagttaataattttaaaaaatgagttgccattagattaatgttatagtggaaggcgtagagtgcattcctgggatgctggccatccacatggccatctgacttaggagaggagcatccaccagtatttggtccatggatgctctgttgatcaggcttgttcatttatgagcaagtgctgaaaccgtctggaacctggggaagtcccagataagagaactgtattatcagagtcaggctgttttggtaatagtgttttttctgtgaagagtcatggtataaaatattattatgaatcacttatcaaaatatttttatagaaatgttgataattcagtaatacttcttaggtgaaattctgttttattgtgataattcaaagattgctgatgaaattcgtgattcccatcattacatttgtgaatccatttcacaaatatattttgaccacctcttggttatcaggcaccagagatgtaatagcgccttaagttcaagttgtttttaatagccccggatcaaaaacaaacaaaaaagcacttagattgtttcaaagatgtattcgagccgtcatatgctaaatgacgagttaatgggtgcagcacaccagcatggcacatgtatacatatgtaactaacctgcacattgtgcacatgtaccctaaaacttaaagtataataataattaaaaaaaaagaaaaaaaaagtttgtcaaagtattatcagaggtttgcagctgtctatctcaaggcagtggcaatttcctttgttatgctgtggtccctgaagtagttgaaatagtgacttttgcattttgtaaaccacagagagtcaacacttcaaagaaacatacttgatcttcctttgtataagctgtttatacaactttgattatacttgagaagtgaggtattgtccaatgtttatacaattacaattcaggactttaccaaaaaaaccctggcatatgagatgttcgttctgacttctgagtttatagaagtttcagttctgaagtttaagaggagtttcacttcatcccttttcattttgaaggtaggagtttttatgatgtcattggtatttaatttttaggaccttttgattttcaaaggtcactgtgatcattttgttctgttgatatcaagttaaggcagttttgacttggagcagttctccatttctctagtttatagtccttgatattcataaactataagattgtccttctgagatcagtgtttattggtagatacacttgatgtggtcagggtttttgttggtttgttttattttttgtcttctaattttaatctgttttatttaggaaggtacacatttgtgtgtgtgtgtgtgtgtgtgtatgtgtgtgtatttaagtcttttgttgtaataattgatattatccagctagtctaaacctttttttttctacaaagaggtctccagtgtgactacttccatatttcaccgtttcctcagctctctattctttgttgttctttgtagtttcaggaagccattgtgtagactacacacacacacacacacacacacacacacacacacacacacatattccttggcaagttccttctttaagctcattagtaattttcagagatctcagagttttaaaaaaatgttaatttataacctcccatgtttgttatgattgtctagcatagtcagaaatctgaattatctggaaattgtgagcagccaagtacctttgatttttgggactagtcaaaggtatgtatctactcataggaaggtctttgtgagaatatctgaaactcacagctgcctagtgatttttcacttttgatcatatctaaatgtacactttccactttctgtttctgtgatacctacagaatttatgtgttttgacaaacttacaaaaaacttgctaatggaagagcaaaggtttcccgtgtcttccttagtctgcagtccaattcatagttatgtttcaattcatagttaccttacattaaacaccttttctgaagagataattacatcattttaattcatgaaatctcaagatttaaatagattttgaaggatacatcgaatgcttgaatctacagcatttcagccacatgactttttttttttttttttttttttttgagacagtctctctctgtcacccaagcttgagcgtagtggcgcaatttcggttcactgcaaactctgcctcctgggttcacgccattcttatgcttcagcgtcctgagtagctgggattacaggcatgcgttaccacgcccagctaatttttttgtatttttagtggagacggggtttcaccatgttagccaggatggtctcgatctcctgatctcgtgatctgcctgtatcggcctcccaagaaaccttgtttcttaaaacagtcttaactagtgaagtctgtatagagaagttcctgagatgctaattataaaaaaaagatatattttatgttctagttcctagcaaataaaatgtattttgtgtttatatttctttattcacaggcagctgaaaaagttggatgaagatagtttaaccaaacaaccagaagaagtatttgatgtcttagagaaacttggagaagggtgagtgtaaagaaactataggtaggtcattgggtcccagtctttttcctgccccagaagaagcagaaggatatgaacctttcagcattgttctaggtggggtggaaggtaaatttacagcttgtgatgtccttcttcgctttactccaatccctattatagacagatttagtgattcctggtctttttaacacgaagaatatctattgttttctcttttgtaggatctgtatgattttatctacttaacagatagcactaattagattaaaattctataagaaactttttaatttgctgttcataatttctgattggtatgcaataactgtttcaatgaaaatcaatgtaatttagtattttaatatttgcacctttgtgaaatatagtaaataaattaagcactatcaccaccttcacagctacttaggagatccacaatcctgggttgggagccagtggatttcctgaaacacagatttgttaatgcgtttataaaatactgatgaaatgatattagtaatgtgcagtgaccatcattgactttcatgatacaattaagtttacataatttttatacttttatatatcattttaattcaatcctgtgtatttattccttcttctgtaatgaccaggaaattaaaatgttaatgacaccatttcttaagtttttcttgttaatttttgaataggcgatacaatcatatgattcaaaatttaaaaaaatattaagacgcatacaataaaaaaaaaaaaaaactgcctcctacctctctctgtctcttagccacccagaatcaccaagggtagcggcttcttgtgtgtctttcagagacaggctatgtgtgtgcgagcgcacactcgtgtttgtgtgtgtgtgtgtctgtatttttaatcccttgggagtatttctggatcaagggaagacctgacatactaacttgtaaaaacaactactgactgatgactatatgctctttaaaataatttcctttatgtcattagattattttttgggtttagtattttttatgttaggagacagatttacaacgttaaacccaatcctggattacatgaaatggtttttttatgatttacctccttgtaaaaaacatgagtcatcgtctttttgtaagttggaaaaatactctttggaatccagcaagaaatcaagcagagaagggaagtaaaaatgacacaccagctgtgctgtgaaaagacaagtccaagatgaatctgaagactgccagttgactggcatcattaaaggtatggggaaatgacagtccctctacatctgttgcctgccattttcagctttagcttgccatccttgctattttccctaaggcagcaaggctgtgacctttaatctaacaatgctcataagttatacttagaataagttcaagactgataggcataattgactatgtaacttatttctctcatttctaatacagtttgctcttactactacaatgtgaggctgacctgggttaaaatccttgctctactgtttactggtcataatagacaagtgggcttaagcaaattgcttactattttggaggctcacaatcctcatctgtaaagttgggataataatatatcaattcatagagttgtgttattacctgaggtaattggggtaaagtatagtgcttatcacaataataaatgttcagtaagtggcaactattgctattctattttaaatgtatcaactgaagcattttcaagacctcatcatgtcaagtcttaaagtatttttaggtgttgttataggtagctctgagctgattgggtttgtggaatgtcaaaggaagactatagacagagaatatatcagaaatataatgtaaacaaaaaataagctaattatgattttttaaattgtattttatttatttgtttgtttatttatttttgtagagacgaggtctcactgtgttgcccaggctggtcttgaactcttggccttaagtgatcctcctgcctcagcctcccaaagtgctaggattagagacgtgaaccactgcacctggacaaattgcgttttagatctatggatgtcttctgcaaggaatgtggaaatttccctatgaagatatcaccagggagaaaacaaagcttcagatctttcttcccatactatcaccttattgttcttctaaataataccagatttctggtatttcttggatttctgttattctgactgaatgaacctaagcaagcctcatttaactaggaatattttgaaggaagaccttcactgcacttcttttccaaacatgtgacacaatgctattctttttttttgagattaagtcttgctctgtcaccaggctggagtgcaatgtcacaatctcggctcactgcaacctccgcctcccaggttcaagcgattcccctgcctcagcctcctgagtagctgggactataggcacacaccaccacgcccgacttattttttgtattttagtagagatggggtttcaccatattggccaggatggtcttgatctcgtgatcttgtgatctgcctgcctcagcctcccaaattgctggaattacagatgtgagccaccacgcctggccaatgctattcttaaattgttcgggaggatgaatggtttgtgaactctcactgacttgtatcttgtgaaatgagctatggctaaaaaaactgttggattctggaggctgcaatcattctgtgttatgaggatcatatggatctgtggcagagtagagccaaagctccagaccaggatgagtggagagcacttgggaagtgttttcaagtggagcctagcaccttttttcttctacttaaagttgtacacattgactcatttgaatttttatcatagaatgataacaaaagcatcttgcccatggtttcataaaaaatgagtgctattgttaagacttgtatctgattaatttggcctcagatactgtggtatttccatttttctacatagatccttgccttgcatggcttatgtaaaacacctacttctccattctctgctgtcagttgtaattcattgaatcatctcattttgttgtagggaatcaagttttaagggacttgcttgtgagtatgattgctgaaatcttctaaccaccccctatccctgccttcagattactgtagatgcagtatatggaatcaggaatcttaacttcatgtgagctattggagttttccttgctatcaggatgcatagggaggtatgaagagtgttctggtcaagattgctgagtgagtgtatgaagagaactttctaatatataagaataatgagtgaaaattattttaaatataaggatatatagacagctatggacaagggataggaaagaaatctaaataatcagcggagactaaagcatgccttatccttgtcaggagattgcatttgagcttcctgcatgaagttgggggctggaactcggctctccatctgtgaactaaagctgaaataaatttgcctgaccacaaccagaaagtgtcatttgcctgtggcctagggaaaaaatggatatactggttcgataataggaactgagcttggattgtatttaagtatggtatcttgaagggcaaaaaccccaaactctgaatataagacctggtttaagttgtatatcccagactactgtactgagaaaaccatgaaatcatcgacagtgagtgtggtatagaggaaaatcattcaagagaaaatgaaatccatgcaaggaaatctactgccatgagataatcagcagaatgggagaattcacactgaaggaaaaagaaataatgaagcaatctcaaaaacaatttaatataattacaattttcaaaaagatcaaggaggagataacatttttaaaaggacatcagattattgacatgattattaacatatttgcccaaaggcagataaaaagttgggaatcttgacaatgaaaactacaacaattgaagttttaaaagcccaataaattggataaacagtaaactagacaaactgaaaggagaatttgtgaattgaaagatagaaatgagactgatcacaacatgcagaaatacagtgttggaaaccaggaagacaacatagattgaggaggtctaatacagttttggtaggaattctaaaagaagatcctagaagtggtagaggaaataatcacataataatcctgagagtttttcattcttgaggaaagacacgagccctcagattgaagaagtttatgaagtgccagatcaactcctagttacattacagtagaatagtagactgttaaggacaaaggaaaccttaaaaactatggggagattacccatggaaaatgataatctgataaaagctgacttctcagccacagtcgatgttggaacactgcaacaacagtgctgagggaaagctgttgtcaatccggtatccaaccaaactatcattctagagtggaggtgaaataaagacagtttcagacatacaggagctaatttatcaagaatgcctttggatggaagtaacaatacccaacaaacagtggctaaccaataaagacattaagaactaaataatacatctgggggtgtgagattcgagaagccgttaattggcttgacaatggtttgacatctgggtaattctcgtagtctcaaatggctgcattagtttcaagcatcatccctcacatggcagtaaccaaagaaagaagggaagtggcaggtggaaatgggccttcttgtgtgcttgtctcctaccagggaagaaagtctttcccagaaacctttcagcagaattatcttcaaatttcagtggccagaactgggcgacatgtttgccactagttcagtcactggcagaagggaataggaattctgtgagtggcttggactaccatggtatatctcctgggacgaagcacatcaccactgtaacaaattaggaagttattttagcaaggaagaagggacacatgctcaacagttgcctctctctggcaaaaagtatttggtgtaatatttaaggatgattatgctagttttgcaagtatgacagcttctaatggaatggaaatatttttatgtgctctgcatagacttaaaaagttttatgttactttcacattgaaacagttcatgagcatctatttggcagttagagtattgtactttgacatagtaggtggcactgctattttgattttttttttcaccaagacagtgtgaagatacagatgtgttgggaaatatgaaagacagtttactcagtattatttcactgacagctgcccaggattccaatgaaaatgttatctgtataaagtgatgatggtatctcatttgaccatcacaaatgagataccatcacatcttgtaaggtagtttgtattattgtcattttacagatgagaaaattcaggtacaacaaggttaataaggtgtaaatgatagctaaatgtagtgttggtaggactcaaatccagcttctttactttcaaaatctagtggatctgtagcctccaaattgactagatacacaaactttattttgatattaagctgttaagggaagatggagtaggaagcaaagagtgtgtgtgctgtgtttacctgatactaatattaaacaggcttagattttaattagtttccataatattttaagtattattgtaagtaagaggagcaaggacagaaagatcttgtggtactagagtgaatacaataaaacaaagactgccacttccatattgtaccccagtatagatggggagacaacgtaagctttgttttcagacacacccgggttcaaatcctggactgataacacaactggtttcaaatcctggactgataacttatgtgaccttgggcaaatcataaacccctttgaacctttttacatttacctgtaaaatagggatagtcatctcatcttcattttttgtaggaatgaattgagatggtgtacagtctctagcagatagcaggcatgcagtgcatggcagctactatattaccatctcataagaatacattcattacagttttgaatgtgaagctttcaagatgccattttgttgtagttctcttgacagttttttccccaaaagtattttagctatcttagttttgcaagtgtatatgtattaggcacttagggatatatgttagaactatcagttgcttgtgttttaccacttcttatatcttggcttgctttgactttataaatgttcttcttctcccaaatgtataggtcctatggcagcgtatacaaagctattcataaagagaccggccagattgttgctattaagcaagttcctgtggaatcagacctccaggagataatcaaagaaatctctataatgcagcaatgtgacaggtaaaggcatgtgggcttcctttggggagaatgtggttttgaattagctatgattgtgtagagtttgatacctagagacacatttacttagatattttgcagaagggagaattcgatggaatcactgtgcattttcttttcagaaaaaaatatgatgataatggttgtttttgtagctaaacctccgtaatttttatgcatggtgttttgtttttttttttcaatttttctttttttttttttctgagacaaagtctcgctctgtcgcccaggctggggtgcagtggtgcaatctcggctcattgcaacctccacctcccaggttcaagtgattcttgtgcctcagcctcccgagtagctgggactacaggcatgtgccactacgcccagctaatatttttgtatttttagtagagatggaatttcaccatattcgtcaggctgatctcaaattcctgaccataaatgatctgcctgcctcggccaagtcccaaagtactgggattacaggagtgagccaccatacctggcttttttcttttcttcagtgagcccttttagaaactaggaagaagaggcagaaggtggtgcttgcttttttttgtgtgtgtgataatgatcttttttacttcctattgagaaaacatttctgcagagatagccaagaacagataattcaaatgttttttagttctagaaaccttagaatatcaggtaaatctataaaaaaagagtagttatgtatatactactgtttgttccttcacattaaaaaaaattattctagctgagagtacctacgtatttatttttgaggaactaagatttgtcaaatgttgtaagcaggaagtcagaccaaaagacaaccacagaaaaccacgtggtttgctctgaaattccatgacaacatgggttggtcactgatagagcaggcttccccagcactatttagattagagacaaacacaaagttaggggcaatgccagctctagggagctgaagatgggtgagaaattctctcagttgaagctgcattcattcttctgaaggctttttggtcagcagatcaacttagtacctgctgtttgcaaaacttctacattagggtttaggtggggctacctaccaaaaaattagtccagaagcctttcagtctcacagacttgggaatgtagtcctttcttttttctctcccttctttttttttcccttctatttttgtgattactgtctactagataaaatccccatttttcttgattggattgaccagatgaaggtggcagttttccatttgctcctttttcagatacattttggaagttctttccatttggcaaattgggactttgtcactttcgatagactgtgcgggagctgtgttccaaacagagtatggaaatgtctttaattaaagaagagatattttcaagcgtctactctgtgctaagcactgtaaggaatacagtgaaatacagagcagagtccttgtgctttgggagtttatagactaattggacaggctaagtatatatatatgtagaggagaatctagccaacagtgcaagtctatagagaacatattccagtagtaaatacttgatagtaatggcctacagtatttaactcctgtcagtactgtattacagggagagtaaatgtgttgatatttaccttagacacttttttcattaatatttaatgtgtgtgtgtgttttgctgtccttgtcactggcatgtttcctaaggtttgaagaggaaattgtaagagttctgagttaatgaagccaatttggttttaacatcagttgttaggaaacttcatttggccatgataacaatctagccagttaaagctggcagctctcagagggcacattattttattttaataggatatttgatttttctctgaatttcttgtttggtatctctcttccagcttgagacctaaaattccaggtttgatcctgaacattttttctttataatagattgtagtatgtgtatgtttttattacaaagtacatatgacttcttagaaaaattcaaatgaaaagaaaagaaaatcacttttccctttggagaaatcatcattttttcttttttttgagacggagtctcctcactctgttgcccaggctggagtgcagtggcgcgatctcgactcactgcaagctccggctcctgggttcatgccattctcctgcctcagcctcctgagtagttgggactacagggcctgccaccacgccaggctaatttttttgtatttttagtagagacggggtttcaccatgttagccaggatggtctcgatctcctgacctcgggatccgcccacctcggcctcccaaagtgctgggattacagatgtgagccactgcgcctggctgaaatcatcattcttaaacactgcttgatacacatattcttccaaatcactttggagttttacagtaattcctgttttgtagcctgcttttttgtttgtttgtttgtgtaaacacagtatcttctcatgttatcacatagtctataacatttttcatggattcatgatattttattatacggctatagcattctttgttttttttgagatggagtcttgctctgtcgcccaggctggagtgcagtggcgcgatttcggctcgctgcaacctctacctcctgggttcaaacaattttcctgcctcagcctcccgagtagcagggactacaggtgcacactgccacggctggctaattttttgtattttagtagagacagggtttcaccatcttgtccaggctggtcacgaactcctgagctcaggcaatccgcccgcatcggcctcccaaagtgttgggattacaggtgtgagccactgcacctggccctgtatcattatttcttaaataaactccctaatgttggatggacatttagatgatatctaaatttccacttttgtcaatagtgctatgatggtaactgttactttttgaacatttataattcttttttgaggataaattgtagacatagaaatgctggttaaagaactcaccaagttttttatacttttgtgatttattaccctccagaaaagctataccattttgcattcttatcaggaggttgtccattttatccttaactatgaataattgatctttccagatgaggaattaatttgtatatacttgctagcatgaattaagagatatttgaaggccattttattaatttgtattgtctctctctctctagccctcatgtagtcaaatattatggcagttattttaagaacacagacttatggatcgttatggagtactgtggggctggttctgtatctgatatcattcgattacgaaataaaacggtaggtttaccttctagaacatgcaactgagctagtttcttatgccatcttcttttctctgcctctttttcagggcattctcctactagagagacgactgtcagatttccccttttccatggttattttccatctttattcttttatgtctcctaagtgtgacagctttttttttttttttttttcaagagaccagagtcccctgtcacccaggctggagtgtagtggcacagtcatagctcactacagtcatagctctacctcctgggcttcagtgatcctctcacttcaggctcctgagtagctgggactacaggcgtgtaccaccatgcccagctaatgttttgttttgttttttaattttttttttttgtggagatggtgtctcactgtgttgcccaggctggtttcgaactcctggcctcaagcaattttcccacctcggcctcccaaagtgctgggattacaagtatgacccccccatgcctggcaatgtggcagttttgacaccaatttagtccagtgatttttagcatgctttggttatttcttactgggaagaaaatgactgttagatcttagttatagaatgaattttaaatgtttaaatttggatttggatttgggtttctgcttctacctagcgtgttcacaaattaaattcctgtatttcctgttaatcagagaataatccccttatgaaagattatttgctgatactgtggttgcagtataagacctaggagtcatgggttttagttctggttcagttacttaatgtctttatgtattcgttcagtaaatatttcttgaacactgttttaggcctgaaggatctaatagtaaataaaacagatgacaactctgctgtcatggtagtgtacttcggaatagggcaacaaaagcaaattaatagtaactattaatagaaaagatataataatgatatatactatgaggaaaatgaatgaggatgaagtgatggtaaagttgtggagactggtgggctattttagagtagatagttgaggaaggtcactcagaagtggtgacgtttacaggaagactcaaatgacgaaaaggagctaagagtcctgaaggaacattgtaggtgggcagtaaccagtgcaaagaccttgaggctggaatgagtttggcatgtctgagtgatagaagggctaccatgactagaagggaataggcaaaggagaagctgtaggagatgaggtttgacaggtgggcagggctagattgtattggatattgcaggtcatgggaatgagtttgaattttatcccaggtattataggaaaccattgctggattctaagcaagtgagcgagccatctgatgtatgttttagaaagataactctggggctgggtgtggtacctcatgcctgtaatcccagcacttggggaggctgaggcggaggattgcttcagtccaggagttcgaggccagcctgggcaacatagcgagacctcgtctctacaaaagaaaaaagaaaaacaaaattagtcaagtgtggtgtcatgcgcctgtagtcccagctaacttttggggtgtgatgggggttgaagtgggaggattgcttgagcccaggaggttaaggctgctgtaagctgtgattgcgccactgcactgcagcctgggcagcagagcaagactctgtttcaaaaaataaaaaagataactctgacttctgggtagattgtgggtggataagtggagaagtagagaaaatcttagcctgtggtttttttgtcttaataagaaaaataagaataataatatctgtattccatatttgcaaagttgggaaaattaatttaaatatgtaaaagtactttgtaaattgtgaggtgctacacaaattataaggtgagggtgttttaaaactgagttataacttttggattattcatatactatcttcttaatttacattattcagaattagtgtgtttgcttaatcgaatagcaagttctttaggaataatatcctaacataagatatatgtaaagaagttccaaaactggaataatttattgaattaaacattggatttcagggcttcttatatgcagcattaagtcaatttatttcaggtattttaaactagtccaaaattaattttgatggcacttttggtttttttttgccattgtaatagtaggttattatatttaagtaaattttaacttaattactaagtgctggttttttgttgttgtcgttgtttttttttttttttttttttttgagacagagtctccttgctctgttgcccaggctggagtgcagtggtgtgaactcggctcagtgcaagctccgcctcccaggttcatgccattttcctgccttagcctccctggtagctgtactccctagtacaggcgcccgccaccacgcctggctaatttgttatgtatttttagtagagacgtggtttcaccgtgttagccaggatggtctcgatttcctgacctcgcaatctgcctgcctcggcctcccaaagtgctgggattacaggcgtgagccaccgttcccggcctaagtgctgatttttaattactacacgttattttgccaaatgttataactctgccctgtccaccgtgatatccactagccgcatgtggttattaaggacttaaaatgtggctagtctgaactgagatatgctgtaaatataaattatacaccagagtttgaagaattattgccataaaaattgtaaacaaaaatctttgattttttcatattgatgacatggtggagtgataatattttggataaatatggttaagtaaagcagattatcaaaattaattctttctttttttttttcaaagatagagtcttgctctgttgcccaggctagagtgcagtggtgtgatcataggtcactgtatgttggaactgctgggctcaagtgatcctcctgcctcagcctcctgagtagctgggattacagcaccagccactgcgtctgcttgtttcctttttcaatgtggctactagaaaattaaaaattatatttgtggttcccattatatttctattaggcagtgctacttcaactgattaacttaactggttagaataaagaggtggtaagtcaagtcatgagctttgttctcttccactatagaaggtaccccagactctagcctactaccttgccagtagtgtttgcctggactttagtgaaagctttatcatttctctctgacttttggcataaatgacttaacttgtctgtgccctcagcttcattatgtataaaatgatgatgataataatagttcctctacctcatttagttgttataaggatgaaatgagattacatagtgcttagcatggattaaacacttagtaacggttagcctttatttatttatttatttatttttgagacagagtctggctgtgtcactcaggctggagtgcacacaatctcagctcactgcaatctccgcctcccgggttcaagtgattctcctgcttcagcctcctgagtagctggattacaggtgcctgccaccacacccagctaatttttgtatttttagtagagacagggttttgccatgttggccaggctggtcttgaactcctggcctcaagtgatctgtccgcctcagcctcccaaagtgctgagattacaggcatgtgccactgtgcttgactttttttcatattattagcatagtacctggtgcttattaaatattgattgataatatcaaaggtgttaaattatgacatattaattgattttcatgacactcttaaaagttatattcctattttatagattgggaaacaggctaagagaataagagaaggtcagtaacttgcttaagtcacatgaaagtagagccaagagtaaaagctacgtcttcctagtcccaaatcctacagtttttgcaccagagcacactccatttcacatctgagttgtttgtcagaaggggaactatgtaacagtttgttgatagattgagtttgtttaggactggtgttgggtctgcagaaagtctatattggccagatcagatattctatactagtttctagcattctcactttcaacagatatttttttcagtgcctactgtgtgccaggtggctttattggtattagggaaacaaaagtaaacaaatcagacatttttaggagcttgtgtttctaacagggatgatatcacatacatagataaataatgggtaatatgtcagatggtagtatactgcagtgacaaggtaatttaagggaatagagtatgagctagaaatggagtaagaaagccctctccattttctgaggaggtgatatttgggcagattacaaactgaggaagcatactggatagacatcaggatgaagagaataggcagttgaaaagtcccagaaaggggagtgtgcttagagtgtttgaggaacagcaaggaagcaagcccttgttgaaacagattgagcaaggtagaaagtggtaaaagatgaagttaaagaggtagctgagagccagatcatgtaaagccttggtaaggactgacttttattttaagtgggttaggaagacattggtaggttttgactctggcttacattttaattatagcttctgtgtggaaaatacattgtagagtgtcaagagcagaagcaaagaagccagtcgggagattatgagaatagtgcagtcaggacacgatggtgacttggaccatggtgattacagagggtgtatttggatatacagtgttttgaagatagagaaaagtcaaggatgacttcaaggtttttgaccagagcaactgaaagaataaagtttccttttactgagagagggaggactgtgggagaagtggagtaggttggaaggatcagagggagaggggtaaggtgatagacatagagtttgattttgacatgttatgcttatgatgctggctaggtattctagttggagatacataaatctgattgaggggagatctggtatggaaatatagccttgggagtggtcagtgtatctatggtataagcagtcaaatgctgttcacaggttgaataagatctgtttatattaaagaaaggtttggatctgattttttctcctttttctaatgcgctgatgtaaactgatagaatttgaacttcttattcttttttcagttaacagaagatgaaatagctacaatattacaatcaactcttaagggacttgaataccttcattttatgagaaaaatacaccgagatatcaaggcaggaaatattttgctaaatacagaaggacatgcaaaacttgcagattttggggtagcaggtcaacttacagtaagtaaaaatattacttgtattgataattttcatttctgtcctgagaagcagttccttttatttacctatttttaaaatataatacttgacttaattgtattagtaaaaaatcacagaatctgccaataggttacaaaagagctagttagtgggttattttagatcttttcctggggttcaggtcacatagcttaactttgttcaacttttataaagatgaaaagtaaagcaagaaatgatagattactctagtgcactacatcaacatatttataaaaggaagaaaaattaagaggaagaaaaattaagtccaaactgctttccttgactaagacataacatcatctcattcaacttccaggtagtacttggcagttactgtactgaaaacactctgttcgtttgagtccaggatacagtctcttgattcttctcctgcctaactagtgcatggaagtgaaaaaagaaaaaaaaaaacttgttttcaaaataggaagtctagaattatttgattctacataagtatatatgaaagtatatatagaaaaatagaaatagttttaggcaggtatactctaaaatttgcaaaaatattacatatcaagtggttttcttgggtggtagaatgaatatatatagtgtgtgtttagaactggtgttatgtacggttttttttttattattttttttttattataagtctgcctgggacatgttagggagcctcaggtattgtaacagcacagaaattgctttgatgtttaaaataaatcagaaccttattcagtatcatgatttgtgggctctccaaaaggttttgttgttaacacaaaagtaaacagtaccagacaatattacctaaaccacagtcttagtcaggaaaccaaattgaaaaaatacaccctctgatggtctataaaataatataatattggccgggtgcagtggcttatgcctgtaatcccagcgctttgggaggctaaggtgggaggatcacttgaggttaggagttcgagaccagcctggccaacatggtgaaaccccatctccactaaaaatacaaacattagccggacatggtagcgcacgcctgtaatctcagctacttgggaggctgaacctgggagattgcgccattgcactctgcactccagcctgggcaacagagtgagaccccatctcaaaaaaaaaatgtgtatgtatgtatgtgtgtgtgtatatatatgtgtgtgtgtatatatatatatatatatatatatatatatatatgtatccattccatttactaattttagtaattgattgattacccaataatgacttacagtgttcttattgctataatgcctgccttggcagaatttttctccccttttaatatgtacaattcagtgtttagtatattcacaaaattgtgcagctattgccaatgtctaattccagaacattttcatcatcctcaaaataaactgtaccctttagctgttagtccccattctcttcccagcccttgacaaccactaatctactttctgtcactatagatttgcatattctgaatatttcatataaatagaatcatacataatgtgcccttttgtttctggcttcttttgtttaacataatgtttttgagttcatccatgttgtaacatgcatcaattcttcattcctttttattgctcagtaatattccattgtggctgtaacacattttgtttacttattcattagttgaatatttagattgtttctgctttttggctgttaggaataatgctactgtgaaatttgtgtacaggtttttatgtgaaccgttgttttcatgtgatacacagagttgctggatcacatggtaactctgtgtttaattttttaaggaactgccaaactgttttccaaagtggctcaccattttgtgttccctgctgatgtatgagaattccaacttctctgcatcctcgccaacattttcttttttgtgtttttgattataaccatcctagtgagtatgaggcagtatctctttgtggtcttgatttgcattttactaatgactagtgatgtcgactgtcattttttctgcttattggacattcgggtatctttgggaaaatgtctatttaaatcttttgcccatttttaattgggttatttaccttgttattgttgaattaagagttctttatatattttagatataagtctcttatgtacatgatttgcaaatattttctctcattctgtgggttgtcttgaaggtgtcctttgaaatacaaaatttttaaattttggtcgtgtccagtttcttttttcttttgttgcttgtgcttctggtgtcacatctaagaaatcattagctaatgcagggtcatggagatttactcctatgatttctttgaagtgtttaatggttctagctcttatgtttagatctgtaatctgttttgagttagttttcatggtgtgagataggcatccaatttcattcttttatatgttgatatgtagttgttccaacatttgttgaaaagactgttttttctttgttgaaatgtatgagtttatttctatgccttcaattctattccattgacctatatgtctgtccttgcaccagttctgtgctgtcttgattactgtaagtttgaagtaatttttgaagttggttaagtgtgagtgttccaactttgtccttctatttcaagattgttttggctattctgggtcccttgtatttccacataaattttaggatcagcttgtcaatttctgcagaaaaggccgttgggattttggtagacattattttgaatcgtaaatcagcttgaaaatactgccattttggcaatattgtcttccgatctatgaatataagctgtctttccatttatttagattttctttaattcttttagcaatgttttataatttgcagtgtacaagttttgcatgtatttggttaaattcattcctaagtagtttgtactttttgatactattttaaatggatttgccttattttcagattgttcattgctagtgtaacatacaattgatttttgtatattatcttgtgtcctggcaccttgctggacttttttttttttaaattaactgtgaacatgtatgttgttttgttaaaaaaaatgagattttttttccttcactaaaataaactgaaactgtagtacaagatgatctgacttggctgtttggttgtgaaacctccagtactactaagtttaggcccctctccggtctcttgtctagaggctgtaggccttgttggcagctttctgggaagtggtggtggtggtggcagtggggattgttaacatgttaatgctcatttaatgttcctgattcacaacaccacccacactctctatagtctagagatcctcggtttcactccccagagagtacacctccagtctaatgccagggtggggcgagggaagcccactagttgcttgatgggagaggaaggtttagggtgcttagctgcttcttaactctttcaacccaggcttcctatttggatgtccgttttcacccctcttttctctgcctgatgccaccaatttctaagtcttttggaggggttggtgttaaaatcaggttgtttcctagttttcctggcgactgactgaggattccatctgatagtctgttcagttagttactattgggccatctgctctccagcttttaaaattctgtggctgtagttattttcccctttgtttttttattcttgtagatttattcttaaaaaacaatccttttagtatctttttgagtgagttttgagagatagtgaaagtaaaatgtatttgctcaagctgtcatctttacccaagactctgtaatattatttctggtggcaacatgggtatttcattgtatggatatagcatgatttatttaactctttccctacagttggatgttgggtgcccattaaggttgcttagagttttcccaccactataaacataaactctgtgattaacattcttgcaactaaatttttcagcatttccttgagtaaatccttaggataatttatttacattggaatctaggtcagaaaatatgtgaatgtatattggcaaagtgcttttgatgcatagtgctgaatttcttctagaagtgaacagtttcagtttccaacttcagtatataaatgtgctcttttcccctcatatttgctaatgctgaatgggcagcaacttgtatcttccctgctatttctcaaagcagttgacatatttttgcatttaattattggccatttataaaaattcgtttgtaaatgttcatttttgtgtcagttttcctaattgaatgttgtactttttttttttgtttttgggagacagggtcttgctctgtcacccagcctggagtgcagtggcacaatcacggctcactgcagcctcaaccaccaggcttaggtgatacccccacttttggcctcttgggtagctgggactacagacgcacaccaccacccccagctaatttttagtagtttttgtagagacatagtttcaccatgttgaccaggctggtctcaaactcctgagctcaagcaatctgccccccttggcgtgccaaagtgctgggattacaggtttgagccattgtgcctggctgagtgttgcatcttttaaataaatcttattaaaaaagataaactaaaaaaatttatgttaaaattgttactcctattttgtatatgctgaaatatcttctagtttactagttgtcttttaattttgattatggctttttaaaaaaatactacataagtttccaaattttatatagaaaaatccatctaccttttatcttatggtttctatctttgatgtcatgcttaaaaaatccttttctccttaacattatagaatggttaatctatgttttttttattttttattattttattttattttatttttttttgagacaaggtcttgccctggcacccaggctggagtacagtggcatgatcatggctcattgtggtgtcaaactcctgggctcaagcaatcctcttgcttcaggctcccaagtagctaggactacaggtgtgtgccacttcgcccagttaaaattttaacattttttatagagataggctctccctattttacccaggctggtccggaactcctgcctctgcctcccaaagtattgggattagaggtataagccagcacacctgctctgttgctcaggctggagtgcagtggcatgatcatagttcactgtaatcttgaacttctgggctcaagtgatcctcccaccttagcctcccaagtagctaggactacaggcatgtgccaccatgcctggctaatgtactgttttttttttgtttgttttttgttttttgtttttgagacagtctcgctctgtcacctaggctagaggacagtagcgcaatcttggctcactgtaaccttcacctcccaggttcaagtgattctcgtgcttcagcctcccgagtagctgggattacaggtacctgctaccacacccggctaattttttgtacttttagtagagacgggatttcgctatgtttcccaggctggtttcgaactcctgagctcaggcaatctgcccacctctgcctcccaaagtgctgggattataggcatgagccaccgtgcctgactgtctaatgtacttctttaaagtattcgttgggctttgttttttatgtttaaaatttcaacttatttgaacttattttggtgaaagtataaggtaggcatttaagtgtagagttctacaaatgactagattcccagtgcttttttttttcataatctattctttgcttgctgattttaaatgacattttaatcataaatcatatgtatatgtggtatatataacaggttattatatatacatatatatgatatatatgtacacacacacatacatatacacatatgccatagtgaacttctggactttatattttttattgctatgctattgtactaatataactttataatacaaatctaagtggggttagtgtacactcattgctcttattaattttcaaaaactttctagctatccaagtaaccatttctaattgaaataatccagtgaaaacaattttgactatcaccatttgaaaacacccttgcaaatttgaagtttcagagctaaggaaatgactaagcagtaagttagttcctgtgttagttttttacataggactgacaatgagattgatttaaatgacctgtcatttgcttctgactggcatagcctaaatcacaggcatttcagaaggaatatcagtgatgatgatcggaagtcctttttcgtatttagttctgtttaaaaattcttcttttgctgggcattgtggctcatgcctgtaatcccagcacttcgggaggccgaggcaggtggatcacctgaggtcaggagtttgagaccagcctggccaatgtggcgagaccttgtctctactaaaaatacaaaaattagtcgggcatgatggtgggcgcctgtaatccaagctacttgggagactcagtcaggagagtcgcttgaaccccaggggcggaggttgcagtgagccaagattgtgcctcttcactccagcctgggcagaagatcaaaactctttctcaaaaaaaaaaaaaaaatccttcttttgctaaagcataggaactgtagggaggttctctttcagtagggccatgccatcctgagaaagtatgcaagtggttatttgctgtaatgtgtactgtatccacatattcttctttagcccataaactaagatattttgtatattattttttatatatcaagtttaaaatttttttattgcacatgtatgctcatataaaccttcagaatgttacagatgtatacaggatagacagtaaaaatctttagtgattctgcctactagatataattaatggtttggtgtgtattactccagattttttgtgctatgatataacagtgtttcatattattggttattgttttattattgttatgatcatcattattatatatattttccttttacaaaaacagggctatattatatataattgtacaacttttttttgctttgtaatgtatgttgtgcatttttttcatgctaggaaaaggtatatatcttcttttttttttctttttaatatggtgtttcagtatatggttatttattatatttaacttactatcttttgatgatcatttgagttgtttccttttcctcctcatctcccccattacagacatttctacagtctttgtgcatatcgtttgagatacttgaacataagatagatttcaagaaatagatttggatcaaaggatatgaatatttaaaagttgaataaatattgccaacttatgtactaaaatgtaccaatttatactacagtaacattttatttcggtgcctgattttctatgctattatcagcattaattattaatttaaaattttttgtcagtcattttagtttttgttttaataattgattgagaatctttttgtgtttctttgtcatttgaatttcttctatgcctgcttgatcatgctcagagtatggtttttatatgtatttcaagtacaaggcatttttttattgttggaaaagcctctttttctcagtagtttttttttttttcttctttttttctctgtagacttcctctgtggacatctcagtagttttaagcttagtgtcagtctctctccctttctattttaggataccatggccaagcggaatacagtgataggaacaccattttggatggctccagaagtgattcaggaaattggatacaactgtgtagcagacatctggtccctgggaataactgccatagaaatggctgaaggaaagcccccttatgctgatatccatccaatgagggtaagaaagtggacagaaagccagtggggtggttagttactgatcatcattaaaaagtgaagttcaagccaggtgttgtggctcacacgtgtaatcccagcactttgggaggctgaggtggatggatcaccagaggtcaggagtttgagaccaacctggccaacatggtgaaaccttgtctctactaaaaatacaaaaattagctgggtgtggtggcgtgcgcctgtaatcccagctgcttgggagactgaggcatgagaatcacttgaaccccagaggcagaggttgcagtgagctgagatcgtgacactgtactctagcctgggagagagagtgagactccatctcaaaaaaaaaaaaaaaaaaaaaaaagttcaatggcttacttgtttaagttgcaaacaataaatgaattatgtgtaaatttgtaagtgtcgctatagatgatacacctctactgactctagttgtagtcattaattaatttaagtgtgttccacccctctccattccagaggttgtgtattgatagccctctggcaggacataggccatagaaatgcttagtttgatttgtgctactctctctctctgtctgtcactcactcattttgaatagtttagacaaccacattttaacatgtcaacattcactagagctgagtagtggttcagagtatgaactctctactttatcagtctccatgattccctgttgtgtcaccaagtattagctgccacttattacagtatttctctaatgtttttcttataatagtgttaagaagaaagcaaactgtatttttgaactcatgtcactgaaacccagccttgttcattttttatctttcttctgcctggcccctataggtgttttgaatttgtaagttttggtttgtagatccccatatcctcttcatctggaggctgtgtactctccaacccctgtctccttctagaatgttaagggcccatagaatgcatctccagtgaagctcttccagtgctcacaccctaagcagttcccaggcttaactgtcccagaacccttcatcacagcactgttgtaatacacccccccgccaaccctgccttcctcaggggctctgtggtcctctccatccttccttaccacagctcttcctcttctctgactaattaattctcctattaaaagacttacacaaattcatgttcccaaggtaagtcctccctcttttttgggagaaggagtgaggagatttactagttacaattttagatttaaagaatataatttaagctgcttatttgtatagtgttttacttttcaaaaaacatggcttttttaaaattggaaatttaataaataatagtcttatttttggacatagtagaatgtaactgcaacgtagtgggccaatttttaatttttccccctcacacatgcgttgatttagcttactttggaagttaatgaccccattgtgatttttgggacttctggttgatgaccttattgtgtagttgctgctgacatctgggggtggtaataacttttaagaggcagggaaacttgacaactatggggtcaaggttatctttaggatgtagatactcttaggtctcgcctttctactttgaaaggcaatgtactgtggttaccaaaataataataataaaaaagcttgattgatgttgtgaggtttagggaacaagacccatatatgagagagggaaaaggagagagggagatatatcaggttctttaaccatcagatgcttagacttttgttggaatttgggtgagcttctcagtgggtaagtgaaaaatcatttaccaagcttcaaatgtaattccacatgtattttttattggagcattacttttattttaccagatctttttgtttgtttgtttgttctaaccaggcaatcttcatgattcctacaaatcctcctcccacattccgaaaaccagagctatggtcagataactttacagattttgtgaaacagtgtcttgtaaagagccctgagcagagggccacagccactcagctcctgcaggtatgaatcaccctgtgatgccatctcgctccatttcatttacttgctgaccaaaagatgccatgaggtcacctacgtggagatagtaaagaagtataaggcaggctgggtgcagtggctcacgcctgtaatcgtagcactttgggaggctgaggcaggtatattgcttgagcccaggagtttgaggccagccagcatggtgaaaccatgtctctacaaaaagaatgcaaaaaattagccaggtgtggtggcgcatgcctgtagttccagctacctggaaggctgaggtgggaggtgggagaatctcttgatcccaggaggttgaggccgcagtgaggcatgattgtgctgctacattccagcctgagcaatagagtgagacgctatctcgaaaaacaaagtaaaagaagtttaagacattctctacctctagggaggtttgaatctatttgagtagaaaagaatgttaaatcattgaacaagacaataatgtaagaaaatacagggcagtatgggattagagaaagggaactgacatttagtgagtacctgctgtccgccacatactttgcatatgtgccatttaatcatcacatagaccctgtgaagggtgggtattatttcagttttatagataaaaaatggaaacttagggaggtttactcatttcgggtcactcagctggtaagtagcacagtcagtattagaacttgagccttttttattccaaagcaggggtaccatcaagtctacccgagtctgacaaagaattaagagcagtggtgggtactgttgtagttcagggtgggagaaggcctctttggactggagatgcaaaaagtgttttcctggaggaggtagcttctaggcctggtccttgaaggacaggtggcatgtggcaggcagtatgcttagtggttaggagcttggatcctggtcagattgcccaggtttgaatcctggctcccaatttactagctttgtgatcttgggcaagtaacttaatctctctgttcttttggttttgtgatctgtgaaatggggatacagtacctgcctcatgtgttgtgatgattaaatgatataatgtgtgttactttgaacaatgttcacatgtattgaagacagtatggtatgaacgtgataaatattagctattataattgggctaggccaaccgtttgcagtcatttcagacccagtgccccctttttataaccaatgtatatatttaaaaactctcattacttttctggaatgaaactcacatataataaaacctttttatgcccataatttaaaaagaatcaatattgtctatgatgtgatggagaaaaataaagataatttataatgaaataatatggctttcaacgtgcagttacttcagcctgacccagtttgcagacataatgaaatagatacctgtgcctggcatcatgaatgagtttagatttaagagctgtaagaaaatcagaaactagccaggtgcagtggctcatgcctgtaatcccagcactttgggaggctgaggcaggcggatcacttgaggtcgggagtttgagaccagcctggccaacatggtgaatccccatctctactaaaacaatacaaaaatgagctgggcgtggtggcgcatgcctgtaatcccagcaggaggctgaggcaggagaagcacttgaacccgggaggcagaggttacagtgagctgagattgtgccactgcactccagtctgggcaacagagcaagactccatctcaaaaaaaaaaaacaaagaaaaggaaaagaaaatcagaaactacgccatttaagaaatacagtaaaaagaatgagtggacactagcatgaaactgatgttaaataataacaggccagatttatttgtctcttattacagaaggtgggatatgatcttacagattttctaagtggaaagaacaaggcaatatgatattattgcaaatgagctgggtcttatttctaagtggattgccaaattctttttctacctggatggggtagtgacaaaatgttacggaaatgtatctcctgtgttgcattctgaccacattttgaggtatactgtccatctctggagttcttacttggaacttgtatcctttgacgggtgatggagaacagagaatggattgccaagaaacaatggggacaatattggagtaagtttggaagacaacaggcaattccccaaaaagaatttccatatgtaactttcacagcatagatttcttatcacgtgctacaaatacaaacaataaaaacatatgatggtattaatattaaaaacttataaagcaaattttattaatgaaattcagcaatacccctttgtttcaagtatctttggtgattgaataatatttgggtcaaaatctgttacatatatatgatcagttttagtatgtctgcagcaactgcatttttgcactaaaatcctttttacctaaatgtgtagttggaaatgctaccatagaaagaacaagtcagatgagtagatttttcagtgatttctaaataatttctttattccattaagctcccctctctaaaatcacctcccaaatcactggcctttttgcatatctcttgaaaacatttttttagtattatctactaaggtgtatacacaccctgagacatttgaaaaatgtgcagaatctgccacagttcatggtcgtacaggacagttctgtactttgcaaaattgctaatgtcccatgccatttgtgctcaccaaacattgtggcagctataacatgttcccaacatgtttacacaagttcctccaggagatgatactccctattgagaatcgctagatttgacagagagaaatggcataggcatttcagccaggctgaaaaagataggcaaagactgaatttgctctactcagagttataaagcgagtgtggtttagctgttgtccgaagcacaaagagaaagatcagattcgttgattgattcaacacatgttatccagtacctactgtgttccaggtactgttttggcactgtcaccatataaactgtctccagtattttctactttgttcttttagcacccatttgtcaggagtgccaaaggagtgtcaatactgcgagacttaattaatgaagccatggatgtgaaactgaaacgccaggaatcccagcagcgggaagtggaccaggacgatgaagaaaactcagtgagtggcagccgttgctgtgggcctcagacattgatgcttgttattttatgattgccaaaccaggtaagatgagtaggaggtattggatcaacttggagctggagatgcttccagcataactatgtcctaacctggatcaacgcatgctagagggttgttgtatctgtgcttattcttctcccagtgcttcctaaaacacttttaaattttactctttgcccctcttttactcaatttaactttttattttagagagagaatgctcaggtctgggacttggcttttcatatccttttggggaatctgggatccatacttaacatgtagcttttacatttatagacttcttcacaaccctgagattccaaagatgttcacatgagtttcttagatctatgtcacaaaactctattaagaagagtagaggaagaattcctttagggttagatacactgcttattatcacgtggataaatttgtcttctttgcttaagtaacagcgctttcatttctggaaggtgagtttaggacctgaataagtgttaaatctcgaaatattttcactaagacaggtagtagttattcagaaaactcaaagtcttttgtcaaattagccccaatttgagattgtatccttttacaggaagaggatgaaatggattctggcacgatggttcgagcagtgggtgatgagatgggcactgtccgagtagccagcaccatgactgatggagccaatactatgattgagcacgatgacacgttgccatcacaactgggcaccatggtgatcaatgcagaggatgaggaagaggaaggaactatgaaaagtaaggctctgagtaaattcactgacttcttagaccaagcatacatatttcagagaagacagattctcatggttcatgcaggcttagccttgggttctttcttttgtcacaaccaaaggagtagaaaacttggaagtttgcgatggggacaggaggtttggtgagggggaaagctggcctgtggagtcaaagtcaagaaagcatcaacagtgagaaagaattttgcttttgaaccagagcagccattttctcattgaatgttgttattattttccttccttaccttgatctttggaggcaagcacatgcattgtttgatgcataattcctgtgaaggtgtaatgacattctgagttatttactgtacatacatcttcagtttattttcatgacagtttgggtctaacccaagtttaccaatactgtcagtcaatgaaagatgactgtacaagttgaaaagttctatccagtttcttctagtttaaactcatctctgcttctgtccgtatctggctgatccttttttgcctgtgactaggcctaacatcttgtgttcagctcctatcttagagtgaaattcttgtgtcattcagtgctcgtggtgctttatgtttcatcccctaaactcaagattaaggcactgtagaaatcccatgtttgatgatgtacaaattatcaactaaatgccatgtactagattgcccttctcctcccctcctgttttaaaagtagccagtatgatttgttagtaatgttcattttgcagtaatgagctactgacctctagttattttcattgactctgagtactaaattgtctacttgtcttaaggggtttaattatgtagatgattataaccgctgtgtaatacaactaggccaacctgttagtatgtgttgtacatgcacgtgttagggaaattgtgcccatttttatttaaagaattaatttttttccaaatgtgattttcataattcaaatgctaattcaatgagttgtttattcttttcagtttctgaacttgttttcagaactggatagttttagcatgtctaatgagaaacatgcatcttttattataatcatgaagagaactgtttaaaaacctaagcagtcacagtctgagtaacattaaatacaatttgttcacagacagtctgttgcagattttgtaattctcccttttggattacagatttgacagatttgccacttattttgagatttttaaaaattccttattgttttaggagttacttaaatttatcattatggaaaattaaaacatacatacaattacacagaataatataatgacccctatagacctatatcactcagcttcagcaatgatcaactcactgcccgtcttatttcagccccacctcaccaaaaagcaattagtaaacactttgtaaaagtattcatttttaaggccatgaaaagcagtgagaggagtaaggggtaaaaaagattcttaaggtaatgcaggcttcaaagtcctgatttataggacatgctatgacatcagtggtattttgggcaagatttttttttttttctgataataactctagaaaatagtaaaatgaattaattcaaagtaaatctgagtcatcataccatttctttataattgattttaagtatttatttaagttattatttttttaacagatagggtcttgttcttgcccaggttagcgtacagtaggtatgatcagctcactgtaaccttgatctcctgggctcaaactatcctcccacctcagtctcccaagtagctgggagtatgtataggtgtgtccagctaatttttaaattttttgtagagacagggtcttgctatgatgcccaggctggttttgggctcctggtcttaagtgatcatcctgccttggcctcccaaagtgctggaattagaggtgtgagccacctctcctggcctgatttaatatttaatattggaccaggtacaagcctggggctcagatactgatctatgtggtgttagataattcactttcctcctatgggtctcagtgccctaatcagtaaaattaaattattactaaacttgtttattttcattgtcccttattcctctaatagtcaacacatttataaaaattgtgtaattcatgacttgcagaactgaaatttctagaggttaaaatttgtgaaaatggatagactttcatttagttccttatttgaacctctatgaaatgtttatccttggaaattaaaattataaatgttaagggaggctatgcatgtgtggcagggagtatatgggatatgggaaccctcctttccttcctctcagttttgctgtgaacctaaaacgtctctaaattttttttttttttttttttggagacggagtctcactctgtcgcccaggcttggagtgcagtggtgcgatcttggctcacagcaacctccacctcccgggttcaagtgattctcctgtctcagcctcccgagtagctgcgactacaggcgtgtgctgccacacctggctactttttttgtatttttagtagagatggggtttcaccatgttggccaggctggtctcaaactcctgatctcacatgatctgcccacttcagcctcccaaagtgttggaattacaggttgagtcactgttcccggcctctaaaaatgtctttaaaaaaatgataactgttggttagtccgagtgcagtggtgtttacaactaattgatcacaaccagttttttctttttttttgagacggagtcttgctctttcgcccaggctggagtgcagtggtgtgatcttggctcattgcaacctctgccttctgagttcaagtgattctcctgcctcagcttcctgtgtagctgggattacaggcgtgtgccaccatgcctggctaatttttgtatttttagtagagatggggtttcaccatgttggccaggctggtcttgaactcttgacctcaagtgattcccccatcttggcctccccgagtgctgggattaaaagtcatgagccactgcgcccggccacaaccaattttttctttgtttttctccactcccactgtttcacttgactagccttaaaaataaaaataaaaaaaaaataatcttttaagaaatgcctgttcatgtcctttgcctaatttttcatggttttttttttcttgtaaatttgtgtaagttccttgtagattctggatattagacctttgtcagacgggtagattgcaaaagttttctcccattctgtaggttgtctgttcactctgatgatagtttcttttgctgtgcagagactctttagtttaattagattccgtttgtcaatttttgcttttgttgcaattgcttttgatatttttgtcatgaaatcctttttttctcctttttttttttcttttttcttttttttttttgagacggagtcttgccctgttgcccaggctggaatgcagtggtgcgatcttggctcactgcaacctccgcctcccaggttcaagcgattctcctgccccagcctcccaagtagctgggattacaggtgcatgccactacactcagccaatttttttttgtatttttagtagagacagggtttcactatgttggtcaggctggtctcaaactcttgacctcgtaatccgcccgccttggcctcccaaagtgctgggattacaggcatgagccaccgcgcccagcctcctttctttccttctgttggattgattgagtcctcaccgccatcacttcctttcccttaccttaatcccctctctccactctcttctaccaactggcaaagtgtatgcataagtatatgcttacttaaatttctactttcctaataaatttcaaagttaatcagtatctctctcctcttcctgaataagaaaaaggatttaagacacttcgcctttttttcaaactgcctctctcatattttgttattgttgtctattgctttggttcaccaggtttttaaaaaacattagcagctgggcgctgtggctcacgcctgtaatcccagcactttgggaggccgaggcaggcggatcacgaggtcaggagatcgagaccatcctggctaacatggtgaaaccccgtctctactaaacaaaatacaaaatattagccgggcatggtggcaggcgcctatagtcctagctactcgggaggctaaggcaggagagtggcgtgaacctgggaggcggaggttgcagtgaaccgagatcgcgccactgcactccagcctgggcaacagagcgagactctgtctcaaaaaaaaaaaaaaaaaaaacaaaacgttagctactataatcattatttagagtcaatacaatttatgaacatagtgagctactaatatgtttgcttacctttgcttctttaagcttatactttatcttatgggctcatttttcttctcctttcagtaggatgtaatgggtagcaaacttttataatttgtatggttaataaaagtcttaatttttttctcttttttgaatatagtttactgaggcatggatttctaagtggactcttattttctctttgtactttgaagagatcattttgatattttctggtatctgttgatggtgatggaaattctgttgtcaatattgttcttttctagatgatttacttttttctctttttttcattttcctgaatattttctgttttaacttattgtctctatgttggattttttttttccttctaattctgcttcttctggctctgtacttttcaatctaaggacccaggactttattcagttttagaaaattctctttggtttctctattattattattttttctaggatttctttttctccttttttattttatttttgtttcattttgtttcggatgtatttatttatttatttatttatttattcccagaaatgtggtcttgctatgttgtccaggcaggtcttgaactcctgggctcgtcatcctcctacctcagtctcccaagcagctgggactacaggtgcatacgactgctccgggcttgtcttacagatttttttctgtttatctctttgaacatttcaatttccctttaaaaaaaaactttcagatcctgctattattttgtgttttttgggtctaatttttctgtttattgtgtttgttatctctcatattgttacatttcttcttacactttgtaaattttgtttttgagcttatgtttggtgagaattatcttgctcggaggtcctttgtattccttgggttgtacaggcatccctagggccctatggggtatttctttctagagcagtctttagattatttctcagttccacattggacttgtggtacagccaagggaattgtatttctagaagttgattttttccacctcttacctaccgaagcagaagccatttttaagccatcttcttaagcttctgggcagtattgtcctggctcctatctttatgctgggaattgagttctggcttcccctttaacaggtatgtcttgccttctgccttatcctgattgctatttgcacatctgccttaaagctaaagtccttgtgatttggttttcccagtaggccactcggctcagtgctgtgggtttctttcccgcttttggcatctggaagttttcgttttctggttctgagcgctatgggttgttttttgtttgtttgtttgtttgttttttaagtcttgagtttctgtttgtttataacaggaggggaggccttagcacttcagctcattccgttatcttaactgtctacagagatgatgtttctccactttctctataaaggaacaggttcagagagattgagattgttgcttgttcatggtcacatggctagtaagtggtggagctggaaattgaaagcacttcagagttggctggacgcagtagctcacgcctgtaatcccagcactttgggaggccatggcgggcagatcacaaggtcagaagatcgagaccagcctggccaatatggtgaaaccccatcttaagaatacaaaaattagctgggcatggtggcgggcgcctgtagtcccagctactcggaaggctgaggcaggagaatagcttgaacccaggaggtggaggttgcagtgagccgaaatcgcgccactgcactccagcccgggtgacagagcgagactccatctcaaaaaacaaacaaacaaaaaaaagaaagcacttcagagtctatgctctcttcattccacagagcttctgatttgttttggttgcctattatattcataggcgttagatccataatagaaaactcatcatagttatggtgattctggtgctgtctttcactgagaatccagggatggcttttgtttgttcgaaacaattgtttattcatttatttatttaaaaaatttcaacttttattttacatacagggggtacatgtgcaggtttgatgcataaatatattatacccaggtaatgagcataggacccagtagctagtttttcgacccatggtcccctttctccctctcacctctagtagtctgcaatgtctgttattctcatgtttatatccatgtgtgctcagtgtttagctcccactaagtgaacacatgcggtatttggttttctgtttttgtgttagtttgcttagaattatggcctccagctccatccatgttgctgcaaaggacataattgcatttttttaacggagtcttgctctgtcgcccaggctggagtgcgttggcacgacctcgactcactgcaacctctgcctcccaggttcaagcaattctcctgcctcagcctcctgagtagctgggattacaggcatgtaccaccacaccaggctaatttttgtatttttagtagagacagggtttcaccatgtcgtccaggctggtctcgaactcctgacctcaaatgatccacccgccatggcctcccaaagtgctgggattacaggcgttagccactgcgcctggcctaattgcattctttttttatggctgcttacacggatggttgcgtagtattccatggcgtatatgtatcatattttctttatccagtccactattgatgggcacctaggttgattccatatcttcgctattgtgaatagtgtggtggtcaactcatcgtatgaatgcatgtgcatttttggtaaaatgatttattttcctttgggtatatagccagtaatgggattggtgttttaagttctttgagaaattagcaaactgctttttacagtggctgaactaacttacattcctaccaacagtatataaccattcccttttctccatagcctcaccagcatctgttgttttctgaccttttttttagtaatagccattcttactggtatgagatatctcattgtggtttggatttggatttctctgatgattagtgatgctgaacattttttcatgtatttgttagccacttgtatgtcttcttttgagaagtgtctgttcatgtcctttgcccattttttaatggaattgttttttgcttgttgatttgtgtaaattttttttttatagattctggatattagacctttgttgaatgtatagtttgtgaatattttctccctttctgtaggttgtttacactgttgatagtttcttttgctgttgtgcagaagctctttagtttaattaggtcccacttgtcaatttttgcttttgttgccattccttttgaggacttggccaaaaactttctgccaaggccaatgttgtgaagggtatcgcctaggttttctttttggatttttatagtttgaggtcttacatttaaatctttaatccatcttcacttaatttttatatatggtgaaagataaggatccactttcaatcttcttaatatggctagtcagttatgccagtaccatttattaaatagggtgtcctttacccattgcttgtttttgttggccttgtcgaagattagctggttgtaggtgtgcaggtttatttctgagtttcctattctgttccattggtctatgtgtctgttgttgtaccagtacaagaacagcattctggttactatagtcttatagtttgaagtcaggtagtgcactgcctctggctttgttctttttgcttaggattgctttggctatttgggctctttttggttccatataaattttagaatagttttttctagttccgtgaagaatgtcattggcaattttataggaatagtatggaatctgtaaattgcttcggagagtatatacattttaattatattgattcttcctatccgtgagcatacaatgtttttccatttatttgtgttgtctctgatttctttcagcagtgttttgtagttctcctagagatccttcacttccttggttacctgtattcttagatatttcattttctttgtggctgttgtaagtaggattgtgttcttgatttcactctcagcctggccattgtttgtgtatagaaatgctactgatttttgtacatttttttatcctgaaactttactaaatgtgcttatcaattctagtagccttttgacagagtctttaggattttctaggtatagaatcatattgtcagtaaagagagatagtttgacttcttcttttcctatttgagtgcattttatttctttcttttgcctggttgttctggctaggacttcccaattatttatttgtttatttatttttttctgaaacggagtcttgctctgttgcccaggctggagtgcagtggtgcgatctcggcttattgcgacccctgcctcctgggttcaagcaattctcctgtctcagcctcctgagattgggattacaggtgcatgccaccacacctggctaatttttatgtttttagtagagatggggtttcaccatattgggcaggctggtctccaactcctgaccttgtgatccgcctgcctctgcctcccaaagtgctgggattacagtcgtgagccaccgcgcccggcctcccaattatttattatatgtaacttatgtgttatactcaataggatagatgttataactgctaataataattattagtgattaggcacttaatatataccacacactgtgatttatcctttaagcatttcacatattttgatcattacaaccatgctgtgtggtaaattgaaccattccctgtttaatagcagttgaaacccagttgcagagattaagtaacatacttgtgattatataatgagtaatagagaagccaagatttgaacccagatatgtttgatttcagtggttatgttctgaatcattagattatactacttctagcagagcccctttatcaagtgttgggagctgggactaaggcttatgttacagatcatgtgttggtgagtctcagcttgtagtaatgtacttctccttgctggttattttgataaccagttactctacatatgtcctcagtatttccagaaagaaaggacagatggttttcaaagggagcatgcctctgataagctaatgatattgttacctctgagggaatttgttttggatgtatgtatctgaatctataggaaggagtcagattgcagttggagagaagggattaaggtgggatttgattgattttaagtggcctcaagcatacatgtgagaacgaaagaggcaaaccatggtccacgttacttggaaaacctctgtctggataaaatattagattggggattttggaaggcttcttctatttgtctagatatgttcttgtttttgttgttgtttttgtttttgaataagggctctagaatagccttgtttacctccccaaacagcaggacacattattgaagtgacatgagagggtctgtgtcagtgttaggatcattgtgcattctctgggccagcagagggagctctgtattaagttaatgggttataatcgtgttcccatttgagttcacaaatcccctttatataaaagtagcctttatgctagaacaagaccattacttattcattcttaagtgtattttaagtaaccgcagtgacactagggcaatgtctttattttatttagttgggagattggatacctcatacttggcaaagttcaaataagaagtcagccaaaacatctcaaaatagtcactttttctctcccttcccagatttctcagtggacttgacacaattggtgttctttttctgtagcatggtaccatgcatatagtttttaaactgtaatcagctaaaatggccttacttgaataactgaataaattttttaaaaaacctaataattcttgtgtagaactgatttgaaagttcttgtgtagaacatacatatatatatatatatatatatttttttttttttttttaagtcaagttgttgggagccaggactaaggcttatgttacagtaaataacagtaaaaatatatatattcctgatatagatcaggaatttgtttttgtttacaatatgagctctagtagtctgttttatttttccatctgaaagacttgcttcctccctctatccaggtctttgatcctgtcaccttctcagtccttctttgactatttgtctgcaatagatttcccatccccttatttttcttttcatcacagattacttcttgaaatttatatcactcttctccgatacaaatttttttttttttttgagatggagtcttgctctgtcaccaggctagagtgcagtggcgcgatctcagctcactgcaacctctgcctcctgggttcaagcaattcccctgtctcaacttcccaagtaactgggactacaggcacgcaccaccacacctggctaatggtttgtattttagtagagatagggtttcactgttttggccaggatggtctcgatctcctgacctcgtgatccgtccacctcagcctcccaaagtgctgggattacaggcgtgagccactgcacccggcctctcccatataaattttaggatcagtatatcaaattttataaaatactactggaattttgacttaattgcattggatacacagattaattaggcagaattgccatctctgtgttaattctttctatgcatgaacatggtttatctttcaatctgtttggtctatcttttatattcttagataattttataattgtaccaacaaagatgttttagagctttttgttaaatctatttttagatacttatttgttgctattacaaatggcatagtttaaaaaacttttgtttctaacatttttcttctatagacaactactgtagatatttatggactgttttattcattgtaacaggttttatggagattgcctttttaaaaaaatggagacagtcttattgtctatgaattatgattatagtttttccttttgatctttatatataatcttcttcttcttcttcttcttttttttttttttgaggcactgtctcactctggaatgcagtggcgcgatcctagctcactgcagccttgaattcctggggccaagcaatcctcctgcctcagccacctgagtagctgggaccacaggcatgtgccaccacacctgtgatttttttttttttttttttttttttttttttatagagatgggatctccctgtgttgcccaggctggtctggaactcctgggtgcaggtaatcctccttcctcaacctcccaaagtactgggattacaagtgtgaaccaccaagcctggccaaggtttttttcttattaagacctccaatacagtgttgcatagtagagctggtagtggacattcttgtcttgttgctcactttaaagaaaattcttgggattttttaccatggagtctgattttgcagcagaatttggtcgataccccttaacaggctaaataagttttggtttatttttagtttaagaggttttatttaaaaaaaattctttaattaatgttgttttgtctttttttaatttgaatagttagctttttaattttcttgcttactaatacatttaatcaacattgtaactttttctcttagttctgttttagctgtattccatacattttcatatgtggtatattgtaaatatttttttccagtgtgtagtgcttgtgctatacacatttattttttaacccatgagttattcggaagtgttttttaatagcaaatgtatgatttttaaaaactgcttatttaaaatttttaatttatagaattgtggttgaagagtgtggtctgttatatcaattctttgttattttttgagacattgtggcctaacatgttattaattttcattaaatgtgctttgtgtgtcttaaaaataatgtattttctaattgtttggtgcaggaatctgtaattagcaatcagttgctaattgtctttcatttgtctatctttaccaatttttgatacttgatcttttagcttctggagatttgttaaaattgttaaattgttaaaattgtcactgtgtggttgtgggttttgttaattttggtattactcacatatgtcatccaaaataatatactggtggcactgaatacaattggtagtactgtgaaaatgatggaattttttgcatattttctcttttatattaaattatatattttctctttcttttatcttaatatgcagaagaatagtttcaccattatccgttttcaagcaaccatttttttaaagcagaagaatttcttctgttttatttgatcattatgaaatagggtgttaatatttagagctaaaatgaaaacggtccaggatgtggtggctcatgcctgtaatctcagcactttgggaggccgaggtgggtggatcacttgaggtcaggagttcgagaccagcctgaccagcatggcgaaaccccatctctactaaaaatacaaaaaatcagctgggtgtagtggggcgtgcctgtaatcccagctactaaggaagctggggaaggagaatctcttgaaaccgggaggcggagattgcagtgggccaagatcgtaccactacactccagcctgggtgacagagcaagactgtctcaaaataaaataaaataaaataaaatggaaaggattaattttatacttgatgtagaaagaatccaagctttcacaacattattaaatatttaaaaagtatatatttgaaagcaaaaaaatattttttttttagtggcaaagataacaaaaacattttggagcaactgaagtagcttgatttgcacagacttgtagtttagcagttaaatgcttttgcccctcatgaggaaatgacaagccaaaggatggccacttgcagtaacatgtactcatccactaaagatttgacatgcggcggttcttcctctcaggattcattggcgataatgtcatggttttcttgtccttaccacattcccaagagatgcatagccctggtcacccctcctcatctccaggcttaataggtcaatgggaggcagaacttggactactaattgaaagaatgtttcccctgaccaagccttcaaattagattcagtgaattgaagggagtgagatgatgattcctctttaaaacttgtacttagtgcataagattctaatttttctcccagagcaacagccacattaatctctttgaaacagaattttaaagcataatgacataattaagttagggcaactaagagacatgttttagttaaattactgagatagtattttgtggtaaaaacattatgtgtttatagttcctcagaaagtcctaagtttcatgaaggcacctattgttgctgtgagtttcctcatgttgaaatcaggtgaaaggctaggctgttgtcaaaatgattttacttcaacaccgtccatcagatactgatttcagagctgcataagataggaattcttgactcagagcctattttctttccatctgcagtttgaaaggggttgttagaacattgtctcccttgtgtgttatctgtcttattctcactgactcagattatggcatttgcaagtacagtaattaggacataaagtactgcaagtattttaacacttcttttaccacggtagccttactgtccaatttctgatcccttcaggatttaaacatctatcatcagagtattgtgttggtgtatgcttgccactcacagtcagcatcacatgagagtttcagacagcattagtccagttatgcaccccaaaactaaagctgaaaacatttgattttgttggaaccctatctctgagtaagggcaagagaaggacaaaggagtagtggagtgaacattgatttttagcatcagtctttggcttgaaactttgctcagggtcttacagactacgtcaccttggtcaggttctttcttttttgatcctcagtttccttgtctgaaaaaatggggcaccaaagttcctattttgtagttttgtcaagatgatatgagattgtatgtgtaaaatatttaatgtgtaaatgctcaaaaatggtaggtattatagtaagtcttttaatgtatgagagtgtttttttcattggacgtaaacatttcttcaacagtgctacttttcttcttcctaattccttttctcttgatactaactttttactaacttttagtttttgctcttggtattgatgatgttttgtaggtgccaccccaggaatgcctgagtgctggcatgaacatggttgagctaagggaaggtcacttgtcagtttcagtaacattttaccattgtgccgagaagagagagggaggctctgtgtggtttgtgtctgtgtgtgtctgtgttttaaattccttggcaataagatgatacatgttttgagaatctattaaatagcccagaatacaaggtgacggatttttaagagggccagactttagatacacatgagccttcttttgtaaagtttcagcctcttatcttaatacagtggaatttattaccgactggattttttttccacccccgaaagataaccactgtggttcactgtgcattttatcagtagctccctcgtgggtgagatttacaatagaagagcagacatcttggtacttaggtttttctcacagtttcaaaaataattcaaggttgtcctgccagagtggagactaaatcctaattgtttgtgcagtttttcttattgtatccagatgttgggcccccttttatctttggaaaccattagcattcttgattcttttggaatgagccaaaaagcacagaactcctgatgcctgaaaattcattcagaacaccctgccagaccacattttaggatatgaaagtaccagatctcagtataacttgagtgaagggctcaaggcctatatattttgaaagatagctactccagtatagttatattggtaaaaggagagccaagaacagccatgagggaaatacatttttcaagagagggcagtagcataatggtaatgaagaacataggaaagtgaatcacaaacaatatactttggtccttaagcctaagaggcagataaatctttcttcatcagttagtggaatatattatttctctgttgctctaagcttgctgttctgaccttcttttgttcagcaagaaaatggagatacatttttaaatatcaatttaagtggatctataaagaaaaagcagatgattcttttcaaatgtttatgctctataaatatcaatttggaatcagtatttgtttataatgaatatttaataccaaccaagaagcatttattaaatagtcactatgtgtcattaacatgtagagtatgaaaaccaaatgaggcattcactgctttcagtaacttatatattaaaaggggaagatgacatttgtcattatcattatctaatacttatggcatgtgtactgttctaattgttctaattccttatgtgtatagagcattactctaggcgcttcaaataatagtatttgataatgatgcgacgtaggagaaaggacttctacatatgaaggtaataatatactaagacaaatgctaggtaagtggtacaggaaagcgttaaaggatttgtgaaaaggaaggcaatgactcagatatgcaggaaggctggggaaggatgttacaggcaggtgcaaagtcagaaaggtagaaatgtgttttcattattcaggttggccgaagcagatgtgggtgttgactggattttggaagactttgaatttgaaagtaaggagtttgaacctgattctcttgttaatagggtatctgaagacactttgactaggaaagtgataaaatggagtttcaaaagactgtaaaaggtgagaccaattaggaaattcttgcaagaaccaagatgtggaccattctcacctgtgaacattttttatctttttagatgtgctgccactattgctctagttagtaatcctttgaattttggatttagctctctttgaatttatatatttcagttcaccagaattaaaacagctagagcaccattgcccagaaattaagtccattcatatagaggcagttactgaaactgcttaactggaagagttattctgggctccagggaaccttataacttatgattccagcaattcttagtggtttcaaaggacattcaaaggaatatttatggctgtacacagctacttggatagtaaccagtgtaattaaatgagctgatacatgtaaagcacttaggtgcctggtaacaaaaacaaaacccaaaaccacacactcataacaaatgttagaaaaaaacaaaccctgtgataagaattgcacattaaggcatactattccaagccagaggaaaacatttgcaggattaccagagttgttgttgttgttgttgttgttgtttttcctgcaaacattcatgcatgaaacagagaaaaaaaatcaggctctgcccagttctctggtttgcacagaattaattacaatttaagtagaaaagagtcattgtaggaattaaggaaacagtaggttgaccatattggtttacttagtgacagtctggaaaatgaaggtttgaaattgaaggtcatgaagtttaaggtctagtagatggtcattccaatggaacagtgggcttcagtctttggtcaaggtccttcccagttatgactacctagacattatgttgtagttcatatgaatccagaaataagagcaaatagttaaggaaaggtgtcttgctgcttaaaaaaaattgagttactgacatataatttacacaccatacaatttgttcatttaaagtgtacagtttaatggtttttagtttattcacagagttgtgcaaccatcaccacaatctaatttttaaaattctatctaatttttaaagttctactttttttttttttttttaatttggagacaggatcttggtctgttgcccaggctgaagtgcagtggcatgagcatagcttactgcagtcttgaactgggctcaagtgatccttctgccttagcctcctgaatagttgggactacaggtgtgcaccactatgcccagctaatttaaaaaaaaaatttttgtagagacagggtctcactatgttgctcaggctagtctcgaactcgtggcctcaagccatcctcctgccttggccacctgaagtgctggaattacaggcatgagccaccatgcctggccactatttttaaattgagatataatttatatgtcataaaatttgccattttaaagcatagaattcagtgtttttttaggatattaacaaggtgttgcaactttaagcactattgaattcaagacatttttatcatcccctcaaaaaactctaatcctgttagcagtcacttctcatttgcctctcacccccaggcaaccattaatctactttctgtctctatagatttgcctgttttggacagtttatgtaaatggaatcatataacatgtggccttttgagaatggcgtctttcattttgcataatgtttttgaggtttatccatgttatagcatgtatcactatttctttttgttgctgaataatattccactgtatggatacactgcattttgtttatctgttcatcagctgatagacatttgggttgttgattccttctgcttttacgtagcatttttcaaagaaaaataaatggaagatacagttgcttatgaattcactgctttgtctgtaggcttagacagattgttcatttagcttgacaaatgctgcttacaaagaaaaataggccagtcttagcataggaattcatgcatttccggcatcagataaaagaatcagagcaagatgtggtattttcaaggcttgatttctctcttcagtccattctttctacggctttaggtttcttgtattatcattcagctgaacatctttatttcttgggatacatctgaaaaaatatgctagctcaagttaaaacaaaaaacccacaagctagctgaagccctgggggacagcatggcctttaatcagcttggaatgattctcttacacttttcaacctgacaagctgctgtccagcacacttgatcatctatctagctaacgggtgctgaaagaaaagttcaaagataaggttactgggaaaattacatttccccactctttctgcacttagtttaatggcagttctaacatgtcaagaatctttattttgattttagagactgtacaatatgagatgtagatcactaaacttaaaacctgacatttggcattcaagtcccatccttgttggttactagcttagaaatctgcaaatttctcacttgtaaaaggggcataataaataacatatatctcaaaagactctttgaggattaagtgatatagtacattttctggcacttgatagatgcctattaagtgtaaggcttttccccctctactttatatggtggtcatgcagtttggatgtgcagtttggatgagaccattatgtgaaagcacctagtagaaagcctgaaatgtagaaggtatttagtgaatgttagttaaatttgaacctaagtttccaaagaatagaactcttttttccagatttaggggtgtatgtttatgcgtgtgtgtgtgtgtgtgtgtgtgtgtgtatgtttatgtttatgtttatgtttatgtttatgtgagatagagatactgaaactgtgtcagttagcttttgctgcattgtaaaccaccctaaaatttagtggtttaaaatagccattttatttaacttgattcatgattctgtaagttggcagttaggttggactcaggtaggcaggcaattctggtctgagctggttagctctgctctgtggtcagctggtgcaataacagctggggatggctgatttatttgttgagacatttgttgacttgggcctctccacgtagtatttcaccatctagcaggctcaatcaggtttatttatattatagtaaaatatacaagactttttttttttttgagacagggtcttgctctgttacccaggctggagtacagttgtgcgatcatagctcactgcagccttgacctcctgggctcaggtgatcctcctgcctcagcctcccaaatatttgagaccacaggtgcgtgccaccacacccagctaatttttttaaaaaattattatttgtagagaccaggtcttgctatgttgcccaggctggtctcgaactcctgggctcaagcagtctacccaccttggcctccaaagtggtgggattacaagcatgagccaccatgcccagcctacacaagaatttttaagtctcttcttgctgtacatttgctattgtctcaatgcccaaagcaggttagatagccaggcccagagtcattgtgagagggagtaaggtaaggatgaagataccaagaggaaattgttgtggccatttttaaaaacaatttatcttagatactaattgtgataggaatgcaaatctgtttactgagaattattatcagtctataaaatcagacttagtacaggtgctgcaatgtaatgacagtgttattcacaataggaatactgctgtcttcttcatataaacttaacatgtcagtaaagcactctcacacatgaagaaagaatcattatggtggaggcatttattttctggaatcactaaatacaaggatcagctaattgtttttgaatgtctgctgtttcttgccagttaaggtggcttcccctatcagtcagttcattcagtttttcactttagttccataaaatatttcatctgcatctctagacgatatctttattacagtttgagttacctcttccatctgttaaaccaccaacaacaaaaaatccaaagaatcagagatactcttgtcactaaaatatttcttgagtcttaactatttttcactttggtctttgctttatgcctgtacacatctagttgtagcatgttttagatgagaggcatccagtatcataatcctactagagataagaacttcttcttttgaatagttattaataactgagcataaatatgttttcatatgctactgccaagtcataaaatcacggaatttttcaaagctgcagggaacattagatataatctggccctgtgtcttctttttgcagattgggaacctgtggttttaccaagatcgtgtagtcagaaccagaatctaaatctttgaactgcaggatagggattactttccatttttttttattgtggtaaaatatacataacataaaatttgaggagaggaatttttccgttcttctgtctccaaaatcaactttagctttttggcaatctgataaatgtaacattttaactaatcattttgctataattaaatttctaatacatatgtgcattttacttacagcttatatctgaatatgtggttagataaaaaaaattctctttttatttcactttagtttttggaacttcgaattctaataaatgtcaggtataatcaggtccctggtattgatatcagaaggtaaaagcaaatacattttagatagactttcttatttgtggattttcattgttgaaagagacaaagaacagttggtgttttaactccaaaaattagaaatttttaagtgggttggtaagaaagaagaactcaaatatgaggcaagcagatgttctcactttttcatctgaacagtgacagaaatagacaaataattatattctcacttaacagacatttctttgatttttatgacatggtttagaattagaccacagaaatgttatctttagtgtttcatcatccttggtttaaagattcaatttcttaagtccacctgtattgcaactgaaagtaattaatgaagaaccatagaaatatattgttttattgttggatataatacattttaaaaaagaatgacgcccttatggtttttgtaaattccattggagaaaaagttttaaattacctgttatttctgtccagaagtcgccatttttattgatgaactcaatttagtcatttatctgtgcatatataaaaatgaatggatggatggataaacagacgtgaatgacagaaataatgagacaagagaggttggtgcgtgatatatgcagcttactctcaaattttaagtgtgtatttcctaagaaagaagataccctcttttgtttgtatttcctacaaaggagttgctcttttttgttaccacaataaagtggtcaaagactgatttttcctttttatttcttgggaccgtgtctcactctgtctcccaggctggagtgcagttgcatgatcatggctctaacatcatacctagagcacacaaaacaaaacaccatatacttgctgattggtcctagcaaataatgtatttaattcttaattagtgaggagaaaacagtgtagtaggaaaccattggcagtctgtggatatgggcagatacgggattggctgctgttgaacttagcaatggtgatagtgagaaaaatgacaaatgttctgagaggtagggtggctggcctgaaactggactaggaagtgtcatgaaataagtaagattgcatagaccaagggtgcctggagagaaacacttgctgttctttatcttctagataccttctcatctacttcttaaggtgctgagccttctggttgtttttcctgattactgtaggaaagggccgtataaacccctatgttcatggaaagcaatgaaaaatacttcctgtatttccctgtattagaatactaatcagaggcacaaagatacttcaacctttgaaacaggtacattcagctagtttgatttttaaatcatgccaggtaaaattattctttctgctcttgttactaataactaatagctgctgtattctgctctcttaacggttactgctactatgtaactgctgatgcttttctccaggatggtttgaggccccatctaagtccccttttaccagtcttccctgaccacacagcatgcaagaactgggcacatataattcttttaatcaattctatttattttatacctgttcaatactaacttctttttttttttttttttttttttgagacagagtctcgctctgtcacccaggctggagtgcagtggcgcgatctcagctaactgcaagctctgcctcccgggttcacgccattctcctgcctcagcctcccgagtagttgggactacaggcgcccgccaccacgcccggctaattttttgtatttttaatagagatggggtttcatcgtattagccaggatggtctcgatctcctggccttgtgatctgcccacctcagcctcccaaagtgctgggattacaggcgtgagccaccgcgcctgacccagtactaacttatttaaaaaaatgttcatgagaagtaaataaaatcaccaatagtcctactaccagagataaaccctgttaacattttgggtattttcccctagttttttttttttcctatatgtatgattttatagagtcaaaatcatactgtatatataatactgtatcctattttttcctgtaagtttattgtaagccatatgtagatagtatttttaaagttacctaatatttcatagagtggatgaattgtgatttatttatgttttctttttcatgtatgtttttctcattattccagttagattatgagattatcaaagaaagtcaccctactgtatcatcccctcttcctacttaaatgcctatagagaatattgtatgtgatagatgctaaatatttttgcttgcttctgtctcattctaaatattataggagctgtttgctatgggagactccaaatgtattatttgcagattatcagaatcattgcatcacccaaatctttccatttagaaagagggaccccagggaaatttctgaatgtattttaggggaaatcttaactcctctggaattccatgagaattttttgggcaaggatttgtgcattttttgtagtttcactagattcttgaaggagtcctttatctaacagaaatatccactgatccagagattgtagcccatctggagatatgtctatttattaaacttacctaaaatttagaatgtttcttttcatttttcatttttctttgttttcaggaagggatgagaccatgcagcctgcgaaaccatcctttcttgaatattttgaacaaaaagaaaaggaaaaccagatcaacagctttggcaagagtgtacctggtccactgaaaaattcttcagattggaaaataccacaggatggagactacgagtttgtaagtagtgttggaagtaaatggttatgtcttcaggggaagttatttgaaatatcacacattagtgcccaagcattttcttgtgcattttgagtctcctaaaccatccctgacagtgtctactgagctgaaggacagtattttgactgatgtttgggcagttctctggtccctgattagtggcatctttttcgctttcgaagtccatattcagtttttatttttgtccagttagaaattgttcatggtgagagaagtattcaatcatcaaatgaaattgcaactgtctttaatagtttatttggggttttgattttatatttaagaattagattggagggcaattgacactgttttgtggtgtccttgttgttttgctaactattctcctaattttaaccctgctgaaaggattattctcagtttttttcagaggatgaatgtataattattccagtttcatatgaaaaactggatgtgttttcctttctctactgtggaacattttccctcaaccatagacacttattaatgttcataggcatttaaggagtagagcaataaaaattttgggaaaaagtaagctaaggagtctgcattttcttcttgactattactagaaaagatttttctcttcaggagctttttatttttacattctaaaattctgaagtttgatcctccatctgtcataattctgttgtttataaaagaacttagattgggcattgggcttgaattctggtaggcctgtctagttctggctttccactatactactgactggcctagaggaaatgacgccattcttccataacttaatttctacttttataaaatggcaggaatatcacagtttatacaactaatggtagagatcctttgaggaccagaataactcatctgaggtaaattaactgattagtcactgaacccatgatagaacccaggctatttgttttattacctgtttgttcatttacttacttatccagtggtttttttttttttttttggatgtcatgtgtttgacactattctagggatgtggtcattaacagaacagccaaaaacccatccctcatggaggtttcattctaggcgaaggaaaataagtatttagtgtgttaaatggtagcaactattgtaaaaaatataaagcaaaagggaggttaggagacagaaagagtgtgtgtgtgtgtgtgtgtgtgtgtgtgtgcatagttttttaaaaataagagtagtcaaggaagttctcactggtaagaagatgaggatgtgaactatgtgaatatctagaggagagatttttaggcagcaggaatagcagatgcaaagatcctgaggcagggacttggctggtatgtttacagaacaacgaagaaacagtctgttttggaatggcatcaataggatgtgcagcaggaaatgatatcagagatataatggagagcgagataatgcagggctttttgtgtaataaaaaggactttagcttttactcttgagtggaatgaaagaccattggaagggatgacttgaccttatttatatttaaaaggtattattctagttgctgtattaatacattataggagaactgtagcgtttctgaacacaggtgcagtgtttttatttactattcaaaggtggcaaattatggggcacatctgctactattctcctcttctaggcctttggcacccatctgttccactgaatcagggttcagcttcagaatccttcttaacacagcacaccaggctgccactgctaatcatagtagacttacgaaatttgaattattgtgcgtctgttccatgttgcctgtatagttgtcttcaacatgtgtataaggactgatttctcagtttagccagtcttcaggcaaagatgtttaactactgggtaccaaatcacatcattattgtgatagaatgcttgagaatcctcaaatctgtagtacttctaagcttagtttccttgtttttaaatgttttagaagttagcgattttggctaggcgcagtggctcacgcctgtaatcccagcactttgggaggccaaggccggtcaatcaccttaggtcaggagttcgaggctagcctgaccaacacagagaaaccccgtctctactaacaatacaaaaaaatcagccagtgtggtggtgcatgcctgtaatcccagctactcgggaggctgaggcaggagaatcgcttgaacccaggaggtggaggttgtggtgagccgagatcatgccattgcactccagcctgggcaacaagagtgaaactccgtctcaaaaaaaaaaaaaaaaaaaagaagttagcaattttgaaaacccagtcactttaatcctttttaattttaaaaaatattgtttatgatatttttaggatacatgtaatattttagtacctgttcataatgtgtagtgatcaaatcagagtaattgggatatctattacctcagacgtttttctttgtgttgggaacattataaatcttcagccgttttgaagtatacaataaattattaactataattttcctactgtactatcgaatactagaacttattccttctctctgacatatttttgtaccccttaaccaacttctcttcatccctctttcacctctttcccagccactgctaaccgtcattctacactctgtctccataggatccacttttttagctcccacatgagtgagaacatgtaatatttgtctttctgtctctgtcttattgtagctaacataatgacctccagtaatatccatgttgcaataaaagaagcgacaacatttctttctcttttctggcggataatattccattgtgtgtataccacatcttctttatccatttatccattgatggacacttgggttgattccatatcttggctattgtgaatagtgttgcaataaataggagagtttagatatcttgttgatacattgatttcctttcttttggatatatgcccagcagtgggattgctggatcatatagtagacctattttaattttttaaggaacctctatactgttttttataatcgttttattactttaaattcctaccaatggcgtatgaacattcccctttctctacatcttcaccagcatttgttatttcctgtcttattgataatagccattctaactagggtgagatgatatctctctttttttttttttttaagagatagggtcttgcttattctcccaggctggagtgcagtggtccgatcatagctcactacagcttcaaactcctggcctgtagtaatcctcccacctcagccttctgagtacctaggactacaggtatggatcaccacgcctggctaatttttaaattttttccaaagatgaggtctggaaatgttgccccagctcatctggaacacctggcctgaaataatcctcctgcccgggcctcccagaatgctaggattacagatatgagccactgtaccggctctttgtggtttcagtttgcattttcctaatgattagtgatattgagattttttcttatgactgttgcccatttgtatgtcttttgagaaatgtctattcaggccttttgcccaactttaattctaatcattattcttggatcagtagtttcaacgtgtaaagaatttatttctctttgccacagttttctcatactaagatcattggcaggaaacttgttttggtgggcaagctacttatacggaggagctttaggagcttttagagagagtactttttattttggaagtagatgacttctagggggagtgggcccatggtgcacagtgaccaggttagcacattgcatgacttgtattcctcctgagactttcttctaaatctgaggtcataaactggcagcaaccagctcacagacctttctgtgtgtcctatacggtgtttaaatttttaatttttaaaaattagttgcttatgttaaaaacttatgagattttacacaaaatgttggatctccagcttattttgaaaatgtgaaagatctggctacagtagacctacattattggttaatggttgtctggagctgagtggcagctgccctctttaggtatgacctctctaattcttcacactatttgacctacttcactcatttgtattaactgtctgacctgtctgacacttaggggcatttgatattgggactcttgcactaaattgtttggatttatatatgcttgagccagcctattctgatatatgacattctactctatttgtaccttcagaatgttaagataatttacttaataaaagtctcttacagaaaaatttcaaactaagcaataaaattgagatgagagatacatgagctgctctcccaacaaagatcaaatgaaaactgtcttcatagttgatattcttgttacatagcttttaccttgatcctaaagcaagcatttgaaataatagtctagaacagtggttctcaaagtggtcccagaccagcagtgttagcatcacctagagactgttagaaaggcagttattcaggccttaccccaggcagactgaataggaatatctggggacagcacccattgattggtgttttaacctgtcctcctggtgactcttacccactaaagttgttctaaaaggtttttacagtagtatatcttcatatacatttcttgttttcttttctattaggtactatagaaattcagagataaggatgtatttctattttattaacattgtatgatttttaaatttccttgttattccccttttgagtctcctatactcttactggaggtaccaaagaagcacataaaatatggaaaatgtatgtttgtaagtgacatctggcaaataaagagctagtcctttgagtgaagaaagttctgaataatctcctgaaagcttaacgaaggatatgtgtcagacttgctaacatgtttccctcacagttgcttttttttttttttgagatggagtctcactctgttgctcaggctggagtgcagtggtgacatgatctcagctcactgcaacctctgccgcccgggttcaagcacttctctgcctcagcctcctgagtatctgggattataggtgcctgccaccacacccagctaatttttgtatttttagtagagacagggtttcaccatcttggccaggctgatcttgaacacctgaccttgtgatccactctctttggcctcccaaagtgctgggagtacaggcgtgagccaccgggcccagcctccttcacaatctcttacagactttctgatttctaggcagatagtatttaattatgaaaaaagataattctgtttcctcctatgaagagaattgctgctttccaatgacctttttgcccaaaatggcaaataggaagtaatttaatcaggagtagccgaattttgtactgacaaaacttcatattttcatctgaaactgaatatttgtctcatttctaaaagtgaattgcctgtttgccaagttgagaaacccctccaaaaatttctaatagtgtttaagatacatagtgattaaaatataaaaggtgcttaaaaatgcaatagtctctaaaattgatatttcatattctattagcagatcacttttttggaaaaaaatgtaatattttgtgagaattcagaccttcccattttgccattcataaagccacaaacagctgtaaacttaaatccaatttggctcatgaatcttccaaaaacacactgtaatattttagtttaagatgacccaggctgggtgcagtggctcatacctgtaatcccagcactttgggaggctgaggtggaaggtttgcttgagctcaggagttcgagaccagcctggcacatagtgagaccccatctctattacaaaaataaaaaaaagatggcccaagtgccaacagtggtgaacaaaacagaccaggcccatgttctcatggagtttacagtgaaggaaatagacattaagccagtaccctagtaggtatcagttcaggtaataatagcgaattttttttttttttaaagcacagttaagagatattgtgagaaaaggcctgtggagagacaggacattcagctgagacatcagtgaagaggggaagcaagtcacaggaaggtaggggaaataagtacagagactgtgaggcaagacatagactatgtgtaaggaaggaaaggagtccattgtggctggagccgagtgacacatgggatagcagtttaaatgtaaatgcatcagtaatcacagtaaatgtgagtgcactaaaatctcctattagaagagaaagagtctggataaaaataacagtcaaattccggctaaatgctgtttataagagatgtaacggaaagaaaatacaaccgaaaagtttaaaacagaggaatggaaaaagatacactaggcaaatactcactaaaagaaagtgggtgaaacaatattgatatcaaatgaggccaagcatggtggctcatgcctgtaatcccagcactttgggaggccgaggcaggcggaccacgtgaggtcaggagtttgagaccagcctggccaacatggtgaaaccccatccctactaaaagtacaaaaaattagttgggcgtggtggcagatgcacctgtagtcccagctactcagggggccgaggcagaagaattgcttgaacccaggaggcggaggttgcagtgagccgagatcatgccactgcactccagcctggctgacacagcgagacttcatctcaaaaaaaaaaaaaaaaaaaaatcagatgaaatagaatttaagacaaaagaatgttacctgggaaggatatgttttatactgttaaaaggtatactttatctagaagatgtaagtcatgcacctatatgaaacatacatatttatcccaaactgatagaaatagaaggagcaatgagaatactgcaattatagtttcaagaagttaatcaagaagacttaaatattcttctctccaaaattgacatttcagttagacaaaaaactaacgcaattaacaacactgataaaacagaaaatagacaaaatttctaatatatatgaaactttaaaaacatggaatatttgtaaaacaactattttattcttttttttacctttatttcaggttcaggggtacatgtgcaggtttgttacacaggtgaattgtgtgtcatgggggtttggtgtacagattatttcatcacacaggtaataagcatagtaacccataggtagtttttcgatcctcaccctcctcccaccctctgccctcaaggaagccctgatttctattgttctgttctttgtgtccatgtgtactcagtgttgagctcctacttacaagtgagaacatgctgtatttggttttctgtccttgtgttagtttgcttgggataatggcctccagctcatccatgttgctgcaaaggatgtgatcttgctcgtttctgtggctgtgtagtataccatgtcaacatgtaccacattttctttatccagtctgtcattgatgggcatttaggttaatttcatgtttttgctattgtgaatagtactgcagcgaacacaacacatgcatgtgtctttatggtagaacaatttctgtgcctttgggtatatactcaataatgggactgctaggttgaacagtaattctcttttaagttctttgagaaatcgacacatggctttccaccatgattgaactaatttacattcccaccagcagtgtataagtaatcccatttctctgcaacctcgccagcatctgttatttttgattttctaataatagccattctgactggtatgagatagtatctcattgtggttttgatttgcatttttctaatggttagtgatgttgagtatttttttcacatgcttattgaccatgtgtatgtcttcttttgagaagtgtctgttcatgtcctttccccatttttaatgaggtcgtttgctttttacttgttaatttgtttaagttccttacagattctgaatattagatctttcttggatgcatagtttgcagaaattttctcccattttgtaggttgtctgttcactctgttgaaagtttattttgctgttcagaagctctttagtttaattagaacctatttgccaattttaatttctgttacaattgcttttgttgccttcatcatgaaatcttcgccaggtcctatatccagaatggtgttttctaggttatcttctagggtttttatagttttaggttttacatttaagtctttaattcattttgagttgatttttgtatacggtttaaggaggggggtccagtttcagtcttttgcatatggctagccagttatctcaggatcatttattgaataaggagtcctttctccattgcttgtgttcgtcaactttgagttactatgttttttttgttttttgttttgagacagagtcttgctctgttgcccaggctggagtaatgcagtggcgtgatctcaactcactgcaatctctgcctcctgggttcaagtgattctcctgcctcagcctcctgaatagctgagattacaggcacctgctactctacctggctaatttttgtatttttagtagagatggggtttcaccatgttggccaggctggtctcaatctcctgactttgggtgatctacccacctcggcctttcaaagtgctgggattacaggtgtgagccaccatgcccagccaatgtttgaaagggttaaaaaagaaatcaggccacgttacctgactataatgcaataaaattagaaattaacattaagaaagtagtcaaagccactttatcccacctggagatataaaaatatattcttaaatcttactttaaagataaaataaaatataaattataaacaatttagaaatgaataataagaattatacaaaattcaaatccctgtaattcagaacctgtgggaggcagtaaacaatggcacttagaagaagatttatagccttaaatgaattttctttttagaatacaagaaagattataaataagttaaaaataggataaagataaaagcagaatttaatgaaaatagaaaacaaaccaaaaagttgattggtaaaaaccaacagcaagatatttgaaaggacctgatatttggtagatttgatcaagttaaaaaggaagagtgtaccaataaactgcagtaggggaaaggcgagagacagttactagaaacagaatatggcagtgtgattagagattattatttataattttatattattaaatttgaaaacttagataaatagatgtttaaacactatgccatatttacttcccatgtggaagtgtaaatgcataaaaatatgcaagatacttttgaacaagaagaacaaggttgatcttattctttcagagaccaaaacataccacaaaaccacaataatgaaagcactgtgatattggcataagaatagaacataggccaggtgtggtggttcaccctgtaatcccagcactttgggaggttaaggcgggaggatcacttgaacccaggaatttgagatcagcctaagtatcatagtgagatccccatctctacaaaaaaaaggaaaaaaaattagctgggcttggtggtatatgcctataatctcagctacttgagaggctgaggtgggaggatctcttgagcccaggagttcgaggctgcagtgagctaggattgcaccactgtatactgccctgagtgacagagtgagaccccatgtcttaaaacaacaacaacaacaaaagatcaatgttaaagagtaggattaagaaacatacctatgtatgtatatgtgtgtgtgtatatataatatagataaatttttaaaaatatatacacctttgttggatgcatagtttacattatatatgagtgtattatataatgataaaatacaaaataatgcaaactgtaaaatttgtgtaaatttaataaaacacaaatcatgctaccatttctatgtatatgcacacatacagctgcatagataaaaaaagacaggatctaaaaataacttgaaagtcattacctgtggagagaactttagttttagctgtctttacacagagagagaatatattactatatcaatatattacttgcttaacttaaaagaaataaatagagcaagatacatttttaaactttcaattgagattttttttctggttttagtctaaataaagttaaccaggttatatatatacagattaagagaaccacaatacttttcagtcagttatcagctttgcaagtattgttgattattagctttcagtatccttagcttttagagtaaatttcctatttattcaaatgaagttgctttcagatttcttatgacttcttctataaaaagagttgatagtaactggccctcacatattaattcaatctatatttattgaggttctctgtgtgtactatgtgtgaatagataagactgcgagatcttttacagccttcactttatcttacccgtctttgtattcataacacctagcaattgcccagcttagagttagcacaccatttcaaattaaactcagacatagtctctgaattcattcattattttattcaactactagttgaattaaactcaaatatagtcattacgcttagagagtttatgatgtagcagaaaataatcaaatgattttgatacattatactaatgatagcttacatttattgaaaatgtactatgtgccaggcattacatatgttacctcgctctcagaaccatcccatgaagtaggaatgttgttattgccattttaggggtaaaaaaactgaggcttaataggaagaataagttcaagagatctattgtacaacatggtaactagttaataaacaatgtattgtattttgaaaatcactgagagagtagattttaattaagtgttctcaccacaaagaaattgtaagtatgtgaggtagcacacatgtaaattagctcgattgagccatttcacaatgtatgtacatacagtatgtccttatgaggttcattttatgaggtttcagttacccactgcagtctgaaaatattaaatggaaacttgtagaaataaacagtttctaagttttaagtagcatgccattctgagtaacatgatgcaatcttgtgccatggcgcatcatcccgcctgggacatgaatcatccctttgtccagcatatctgtgcagtacacggtacccactcctagtcacttaggagccaatttggttatcagatcaccttttgaggtataacagtgcttgtgttcagggaacccttattttgcttaataatgtccccagcgtgcgagagtagcgatgctggcaattccagcttgccaaagagaagatgtaaagtgcttcttttaagagaagaggtgaaagttcttgaccaaaaataaggggggaaaaaccatatgctgaggttgctaagatctgtggtaagaacgaatcatccatccatgaaaattgtgaacaaatgtgaatcttccatccgcgaattgttgttgtaattgttctattttattattagttattgataaattcttaactgtaacaactttataaattaaacttcattataggtatttacgtatgggaaaaagctgaatgtatagggttcgttaccatccacagtttcaggcatccactggggttttcagaatgtatctcctgtggataagggagggactactgtatttcaaaacatcatgttgtatacaataaatatgtacaaactgtatttgtcaattaaaagaaaaccctgagactaaaagggaggtggttgactacagttatacagacagttagtggcacagtgaggattttaaccaaagcagtttggctccagagcccatcctcttaactatctgtactgtgtggcatttttctaggctattctggtaagttctctccataaagtacataaagaaggggctgtaggagcccaaaagagagagcaagaaccccagggaaggcaccaataagtgtcattggaagtgtgttttgaaagatgaagtgtgtctgtggggatactaaggagtgtggcatgggtccaggaagtactgagtaattgagctggagcattaccagtgtggatgtgtgcaaaaggggaggaagggagcgaaggagagaacttcaggtgaagtaaattaatgcccaatgtacccttttttgctggaaatatttagtactcttttagattttttccttggtatatcagagaaattaaaaatggagtcctaatgcagcacagagagctaatatccatctgacgttgtgtgataatgggtccatcaggatataaaaccaccaaactgttaattcaaaattaatttgataaaagtaacagaacctgaacaaaattgattgtttgaattccctggatagttataagccattcagttggctttttgtggtaaggaaggataaattttagccctgagtttttcccaggaggccgataacaacctatgattccatgaaactttatcttaaccattctctcctagatcagggctccaaatctgattgtaagttgagatttctttgggtttttacaaagaagctttactgaattgtcagaacatagtcagttactcatttattattaggttgtactttttgcttttggctgcacatgttagaaatcagacacttgctgggaggcaagaattattactaccttatttataattagaaatcatgattgaaatggtagaagaaatgctttatttgcctacgcttaagtcaatactgtcaagaatgcatcttgatgtttcctgggaactcagttatctacaatttgaaactttatctgccatttcatagagacaaaaataactctcccaaaacatttggtgaaattattgttcatttatttcaaagtgactctaaaagttagtgcatattcttaaatttaccagcctttaatggtaaggtaaaatttaatgtcccattactcagttacaacaatcatcaagtcagctattcttgttttatttaatccttcacctccactattcacccacactgcttgattgttttgaagcaaatcccaggcatatctcatttctaaatatttcatgtgtatttataaaatattattgaccttttaaaaattataatacctttatcatacttttacaaattaggagtaataaatttccttaatgccaaaaaatgccttgttactgtttagtctcctggatttatatatattttttagcttgtttgaattaggatccaaatgcgatttataggaagttggttgatatgtctcttaagccacttttaatttaaagcccttcctttctgctacccctgctcgtgtactctgagatactgttggagaaacccagttgttatcccatatagtttcaaccttcattcgggatattgctgattgcatctaagtggtcttatttaatatgttccctgagtttcttataaattggtagttttatctagaacagaggtcctcaggaccgcttcatacttataaacattattgaggaccccagagggctttcgtttatactaatatttactgaattagaaattaaaactcaaaaaatgtttaaagaatttatttacttaaaaaaaaagctaattatacattaatgtagtttttttcaatgaaaaatgaccattttcccaaaacaaaaacaaatgagtaagaaaaatagcattgtttacatttttcaaattttttggcttagacagatagatgatcctatctgttttgcattcagtctgttgtaatacattgttctgtttgaagtataggaagaaagtctagcctagcaaaaagaggtgtagttgaaaaagacagaactattgtaatagctgtttaagataactgtggatagtctttgaccctataccaaaactcaacaagtagtggtttcttataggttagttgcaatgtagaatataaaactaaattcatgaaattttcttactctgtatattaaaattcattgatgttttaaaattttgagtggaacttttactcacacatgattttgtaacatcacgcattgggcatttggaagatgttggttcattcagttacatggatcttctaaatgttggcacatttcattaaacaatataaaaaaaccccacattccttgaagttatgaccagtctcatcagaagagtagctaagtgtagggaagttgtcaagctcacagtggtagattcaagttttccagaatacttattttcatttgaaggtttgaattttatcatcagctacaacactcttagttgttttcctttgagtgacagactcacttttttcatttctgagaaaatgtctgccagatacccaagtctgaatactcacagtttgtcatttttcatgtaaaatggtgctctgtggaaaaagcagctggttgagcttgcagctcaattgcacaagtgctttgcttcaaaatgaccattgtatttcagttaaaacagaagtgctatatgcggacttcccatttcatcatagatactattaaaaagacatgaacttttttactacttcatcaaggacattcttaaggatttttaaaaaactgtagccagtgactgtaaagaatgcaataactgctgacactatttggtgccactttttggtttctactgaggctaacagttttagcccccactgcttttgtgtaatcagtacagatgtcaacacagtagaaaagtcaaatagtgtcttaagattaatatgaaaatagtttggtcttatagagtcccctaagagtgtgtcagggatcttccagggatctgcaagccagactttgagaattgctgatctagaagcttgatcagaatcaggttcgatttttttttttttttttggcaagggtatttcataggtggtatgtatacttccatcagaaggttcataatatctggatatatggtcatctctctttttccgttgttagaaaccagtgaaggtcattgtctggatgccatttcattagaggttacaaagtggtgacatttgatcatttcttctccatttaccaattgaagtaaagaagcatttcattatttagataatctcaggtacaatgtatacagaaaagacagaatatgcacttgattttttgatttttattataattttcaaaataatgtattggttccctggcattctccaaagatataaccagggattttttttgtatcataaattcgtggatttaaaaatatttgatctgtttcaatcctttcatctatttcttatgttcaaatggttccatcttgatataaccccagtagttacttttaaatgttttattgaggtatgctttatatactccctggtagtttgtgagagcatccttgctttctagtatgatgagatgtgagatgttccaggctcatcttgtccatgtcttgctccaaacctggaaacagaccttttttttttttttaaggaactcaggtttttaaaatgggaaatggtaattagagaccacagtctgggtgcaagttgtgctcattgcagttaggtcatttttttctaagccttttcaatgtatgaatccaggaaatgtgtttattacaaactcatgcgttcttatgctatttccagtgtagattgaatactactagttttttccttaaccactttcatcccacatctgtaatcctttcccccatgccaaatatcttcccagcaattctaatataattactcatttgtttttcaattcacaataaatgtcagcctcggaataataatgccagtacttctgacaacaatactgaaaacagttaaagatttgtgttgcagcttgttgtccttagggacatcccatatagatgtacaatgaaattattatatgttaaagctactgggaataatttctacgtggttatgccacaaacttaattggccaataggtttttttgtttcattttgttttttgtttgaggtattgctttttattgttttgctttataattatataaactatatggttccaaggggcaagtctacaaaacaaagttgttcagatttagtttctattcctatctcctctgtttcctcctttttttaatgtttgggagatatacacaagacacatgtatgcatgcatgcatgcacgcacagacaaatacatgtatgtttgtactaccattctgagataacagtagtgtcctgtccatacttttctctgtttgttttttgttaattatatatcctagaaattactccatagccatacatagagatagtcctcattcttttttcctatgcttagtattctgttgtgaggatgtattgtagtttattcagccagtcctctgatgatacacatttaggttgtttgcaacagtttttaagttgattgcttcataaacctattcataaatagggaatgcaattttttatgattgttttggttttttaggttcatgctttgtcagttttgagaagcaagttacatgttttaagcgtgtttagcttttttttttttttaaacagcaaggagtggatttattcagaggtctccctctgccacattttagtgctgtttgtataaagcagcccctaagactctagtcataacatcacgtgtcacaggaagagtgagtaatcaatctcctggcaaacattgtttgttagcctgccgcaggcattaaaatgttgccaggtgttaacaacctggaggcctggaattcctaattgctgtaatcagaacctgaagtttttaaagtttgaatctcattacaaccaaagccagatttggttcagttactttaatttttctataatttgaagtcagaaaagaaaaagaaaaacaactgtaacttcagtgttgtttattattcatcaagaaggtttcaatggctgaaatttaaaatgtaaattagctattactctagaaagcacagtttttagttttcagctgagatgaatgtatttttcttattcctggatctatagccacgcttttgaattatgatctcattcacttagacacatatttttcactcttcttttgagctgttgaagatattttcttcagtctttcttttcagctttacctcctgtttttttttctcacacgaactcttgacaattcagtaatccttattcctgggacatgaaatgttgagaagacaaaggagatttatgcaagttttcccactccatccaaagaaagggtctctattagagctcttgaaagtgatatttgcttatgtagcccagtgcctctgaaagaaaaaacatgatgcagaacttttctcattatctaaggtgtgttcctggtgtcatttccctctcccaacaggaccacttttacctaatacaaatctggatcctccactactcaagtgaaatacaacgcaattagcatcttttgtctttgataacacacctactccaagcaccagtaatgctggaatggaaagcatgtttcatttcctttcttcatttctctgttggagtttgatgctgatattactgagatttctaatggacagtgtagggaggagaaggctgattgatggtaatttattgtactgctactgagaaaaaaacacaactcagggtattggttgttcgatacatccagattttttgactgaaaatgttagattttactttttcttttttaaaaatttccaacttttaagttcaggggcacatgtgcaggatgtgctggttttttacataggtaaatgtgtgccatgttggtttatggcacagatcatgccatcacttaggtattaagcccagcatccattagctattcttcctgatgctctccctcctcccaagcccccaccctctgacaggccccagtgtgtgttgttccccaccatgtgtccatgtgttcttatcattcagctcccacttataagtgagaacatgcagcatttttttttctgttccgtgttagtttgctaaggataatcacctccagctccatccatatccctgtgaaggacatgatctccttcctttttatggctgcataatattccatggtatatatataccacatgttctttatccagtctatcattgatgaacatttaggttgttcattacagcactattcacaatagcaaagattttacatttgtttagaaggcttgataaagttgcagttgtgtaccaagtgtaccaaagtgactgttcttttagtgaagaagcagtagatttggtagttaagatcattggaatcaggctttcagcgttcaaatcctgacttcaccatttgctgagtagctgtgggccacttacctctcctctctgagcttcattgtcctcatctgtaaaatgaagtaatactagaacccataggatacattttgaacctatatgagagttaaatggagtaatgcacatcaggggcctgcaatataatacagattgagtatcccaaacctgaaatcctgaaatgctctaaaatttgaaacttttgaacagtcaaagaaagtgctcattggagcatttcaaatttcatatttttggattagagatggtcaacaggtaagtataatgcaaatatttcaaaatcctccaaaatccaaagtttaaaacacttctggtcccaaacattttggttaagggatacttcacctgtagtcacttcataaatgtcagcttctcctccctccttccactttcccctcctttcttgaaacattgtccatggagtaaatttcactacctaaacttttcccccagtgatttgccattgccttctgttataaaatcagagatacattcccaaagaatacttgctcccagagggactgatctaaaactactctaaaacaaaggaattaaaactattactgcttggaaattgattaccaaagtgatcataggtatcaattttagaacttcctaatgctttcttcctttcttttccttacatctctatacaataatacagtgtttctttctacccacctctcaaatcatgaactgttgaggttaacggaaattttcaaatcttgaagctctgaaactacttcccttacagtaacacacttctaccaatagatgccgccctttcacttcttgagtgcacaatctcctgtgtggcatttgcttaaggcagagcttgctggctatgtaaaatgaatgataaaattattgaaccaggccgggtgaatgataaaattaccgaaccagtggctcatgcctataatcccagctttttgggaggctgaggttgcaggatcgcttgagcccaggagttcaaggccagtctgggcaacatagtgagaccccatctctacaaaaaataaaagcacattttaaaaagccaggtagggtggcatgtgcctgtggtcccagctactcaggtggttgaggtgggaggcttgcttgaacccgggagtatatggtttgcagtgagccgtgattgtgccactacactccagtctgggcaacagagcaagatcgtgtctcaaaaaaaagaaaaaagttactgaatcactttagaaatttgacattgtgtgaagtgagtttgtttgaaaatagggaaaacttgtaacacagaccagtagaatgaacattacattacataagaagaagggtgaatggcccaggctttagctgggaccttgggtgagtcaccctcctctttgaattttagtttgtgatctgtaaaaattaaacataatagtacctatcctgcttttcccacagagttggagaaaggatcaaatgaaatatacattgggttatttgaactaagtttactttcaaaactttggtagaattttattagccaagaattataaggccgttgatgtttattttcggttcattgtgtattaagtattatcacttatttttatttcacattttattttactattataaaaaaattaactctttgaatgatgacaaataattcagaagtgaggaagacaaaggagcagttaagcctggatttctggtatgactccgtttgctgatgatagtaacattatcactttagatctaggtagcatttaatatagttaaagatgcattcatagtttgttcttttgtttggcaatgcttacagtgtttctgtgaggtagcagggtggggtttcttatcctcttatagtttgaggaactggagcccagagacattttacaaaggcatctttcctacttggtgccagaatcaggtctggaacccagacccctaagtggcttcctgtctgcgttaattcataagtgtgtgtgttttctcacatgaaaacaaaaacaaaaactatgcttacatattaaatacccaatgttataaaccaggaaaaagaatcttctttcaaataacatgtgatagggactacagtaaccaggaagaatgatttcaggtttattgcatcttcctgggaatttcgtgacattagaggagtatttattattaactcacagtgttttttttcatgcttattgagaacacaatgcagattgacaagctttgtatttcattaattgtttatgcaaacaattcttattggagcaatttaatttgtactttcttttgctgttctttcttatttactttctaattatgggttgtacagtaattttgctattgtcagaaagtgtcttttttttttgtttgttcgtttgtttttttgagaaggagtctcgctctgtcgcccaggctggagtgcagtggcccaatctcggctcactgcaacctctgcctcccgggttcaaatgattctcctgcctcagcctgctgagtagctgacattacaggtgcatgccaccatgcctggctaatttttgtatttttagtagagatggggtttcaccatgttggccgggccagtcacaaactcctgacctcaggtgatccgcctgcctccgcctcccaaagtgctgggattataggcctgagccaccgcacctagccagaaaatgtcattctaactaaaaaggcattattattttaagaacatttttggttttcgccaggtgcaatcccagccctttgggaggccaaggcaggaggattgcttgaggtcaggagttcatgactagcttgggctacatagcaataccctgtatctacaaaaaaaaaaaaaagaaaaattggctaagtgtggtggtgcgtacctgtagtcccagctactcaggaggctgaggcagaaggatcgtttgagcccaggaagttgaggctgcagcaagccatgactgtggcactgcactgtagcctgggtaacagaatgagaccctatctcaaaactaaaaggaaaaaaaaaaaaaagcaaatataacctctgaaaacaaaggtatctattgtggaggaatcttaatggatacaggaaatatttgatatattttctggttatatctctgtcacagtgtgcttgtcagtctcattcaggcacttgttcctgaatttttcttctcttctactctgttatctattgtctaatcagtatgggcttttctgctaatttgcttttctttttttttttaaatttatttatttattttttttccgagatgaagccttgctctgtcacctaggctggagtgcagtggcgtgatctcggctcactgcaacctccgcctcctggattcaagcaattctcctgcctcagcctcctgagtagctgggattacaggcacctgccaccacatctggctaatttttgtatttttagtagagacagggtttcaccatgttggccaggctggtcttgaactcctgacctcgtgatctgcccgcctcggcctcccaaagtgctgggattacaggtgtgagctaccacgcccagcctaatttgcttttcttactccagtgttagataatgaatatttttagtaatcttcatattggttgctcattatcttgtctaattttaaattttattggcagacacacttggtctcttaagactaactacattttggattttgacaaggaaatgatgaaaatagcagttattgaatgcttgttgtgtgttaggtccctgtaaatgttttataccatcttcttttcataatatcctcacatggtagatcttatagatcttattcccacttatttgacagagaggctttgaggcgctaggtgacaagagatgctaggtgacctgtcccacccttggtgcatgattaataaaagatagaccattatttttctcagaataacgcacgtttgtttgtgtgagaatggttatatatgtgccgatggtaaacattcatctaattcagatgctgcatcttttctttctctaacatgtgcagcccttagcgaattgccatagcatgcaggtgctcagaatgtgttatttgattatgttatttgggcccattgtgcactctttggaaatctttttaaatttcttcagattttctttttgtaatatccattcatctatgtgtataggaatatgttaattggactataatttcatagatgtggaatttagatttcttccctgcttctttggtaaaactgtagtaaaaaacattgattggaaatacagtgttgggaattcccttgatcgaattggataaagcataaagcatttagcaaagtgcctggcattcctaatctattattaatatgtgggttccttttagagtgatggcttatttatagtgaagaagagcagtgggttgggaatcaggtctcagctctgactgtaactagctttgtgtccttaagtaagccacctaacctttctgggactctgtttctttgtctgctaaaggtaagattaagccttcaagagccctcaaactctcttggtctttgtttgccaatttaaaaaatgcagctaatgcgtctctctcatagggatcatgtgagcctaaaataaagagcttgtgtaaagtgtgtaaaagatgctcagtatatataaggttcttttcctgttcttttaaaagcagagaaatgcttaggacacccaggacgccaacatgagcatagaaggcagtctgatatactgaccaagagcagatagacttggatccattgctggtttcattatttatgggaccagtaactctaggcttctcacccaacctaaaatgaagatactaatcatatttacttctgagttattgagaagattaatttaaaaatgcttttaaagtgcttagcagagtatctgacacagagtaggcattcagtaaattttatttacatgtgtaacacttagggtgggagacatggatgaactactggaaaagggaaagatactgaggtgggctgccctaaaaaaggaaggtaagaggaagacctacacttatttcacacttttgttgcaggccctgctagttcacacattgtttgctttgtgattttttttttttgagacggagtgttgctctgttgcccaggctggagtgcagtggcgtggtcttggctcactgcaacctctgcctcctgcgttcaggtggttctcctgcctcagcctcccgccaccatgcccggctaatttttgtatttttagtagagacggggtttcaccatgttggccaggctggcctcgaactcctgacctcaggtgatccatccgcctcggcctcccaaagtgctggaattacaggcgtgagccaccatgcccagccatgatatttattttatacctaagatgagcttaattctgttatgactttcttgttcctagggtgagcttaattctgttatgactttcttgttcctagggtttaaatatcaaggatactcactaaaacactgatagaccttttgtgttttctctgattgcttcccttctgtgcctgcctggaggctataggtcctggacagttcccacattgatgttttttttttcaaaacagttttttcctgatggtacatttgttaatgtaaaatagctcaagtaaatgtatgtgcgtatgtatgaaagagacagagagagacagagagagctgtatgggatccatcagctgccgagggtaccctttcatcaagcagagttcacattgcagagcattggatcagagggtggccagcagctggagggagagcaaacttgaatctactttatagacccactagtcacttccatttgccctttacttaggagaaaatacacagcaaaaactgttctttagacatggatgcatctagtttaataaatcttaatgtagtgctattaaaaatgaggtaaagtcaggaaattttctaccccctcccaagtgctcttattcctagatatgcaggaccaagcataaagttattttcacacattgggaagaaatgttccattccaatttcaagtggaggttttccacttttggaagtgctgctgagactgcaattataaactacaactattcttttaaaacagttcctgggatgaattaagatcttgcagtaaaaataccatatacaatctgtcacattatctgtggaactcttccctttgccagcttggtcagtgagggtaacagctgcccagagttcattgctaaacggatgtttaacaatggtactgtgaattcagcacttcatattagaataatgcttgagttcctggtattcggttaatggagttttacgtacagtgatacagaaaatatgtgatgcacaggatttcagctttttaagaattctcaccacttctcctcccatctcaattttgttgttgtggaaaatgaaaatcccacaggaaagccaagtgtagtcctcattccctgacttctggctttgtactccatcactttccacttccttcccctcccctctctacactgttcacctgggcctaaacgtctgaatgactgcagcctcaaggaaagcttcaagttagactagatgacctttaaggttttgttaatcctgagaatccgtttggccacatcaatgagctcctttgtatctactcaaatgtgatagaacagacgagcattcagagtaaggggatcttcctaggctggctgcagagagaacagtcagcagtgctcgtgccatggctacagattacacatctcactctgggggtgtgtggggactgggaaagggggagccagtttggcctgtggcacatgtaatttttatactttgaactactgaaatgggtctgagttctccagctcttcacagaccccatcacttcctgtttttgttttatgagcagactgttgagtttatttctgttgtctttgccagtctctcaaaacatttgtgtttgtgatctctgatttaaccagtctccagctgatggtcatttaggtagccttcagctttttaatattaataaatattgctttaataacatctttgcatggtacgcccttagaattaattcctgcagtagaattattgggtcaaactgttcacaaatttgaaattttgatacatattgttaaatttccctatcgtttttggtatgtgaattgttgctttatattatttactgaattttccatggaattcttattttctttattgattttaaagacttcttcagctatcaagtcaggttatgaaccttttaacatatgtggtaaagatattctgctagaatatcttttaaagctttgtatatggtatctaacttcagacatttaaatttttatatattttgatttattagctttttcttgtggtttctggaattttatgtcatctttgggaaagtttttcacattctaagattacaaaaatattaacccttactttgttttagaatgttttattattttttctttctcaatatttaatctatcatgtatttgtcttggtgttaagagtaaggtagcaatcgagctttatatttttctaacaaccaagggtttaaaaaatacataattaatttagaattaccaaatcttaatagcttatagtacctaaaagtggcttgtttttacagatagaaactttccacttcaaactctgagttttaatgtttttcggcttttaaaacctctagaaagaaactgtgaacagaacaccgtattggttttggcattaaccttaatgcatctcaaataggctgattctacagaatttgatccaaagtacttctatgtcttgatcctttttttgccaagcaaaattgattgtttctaaccaaaaggcctttagtgctagactgaaagaaaagtaaggtggtccttctgtgctggttgtattttatataatttggcatcaagtacaatgctttttatttttctctttagtttctttcttttctctagcctttgatggtccaggcctcttgttgctagggggctttttgggagacaaattcaaatccttactgtctagctcattgttattgtatcttttagtgagttccttttttcatggtagttcaataagtggttaccaggggtctttctttgacagttattactagcttctcttgtatagtgggatttagctgtgggttgatttgttgtgctggtatgttttcaactgcagcgatgcattgctctatcacatggattctttttatagcttcattagaggtgttttagttcctcttttgaatatttatctgagtatcttagtaccttggcagtcacactatcctaaattattatagtgccttctaaagtagattttgtcattgaggcttatgtttaggtcaggcttgcaggcagggagacagattatgccattgtggttgagaggcatatagtggttaaaaccactggagttattctgttagggctcatagcctatcttctccacctattatgccacctgtctaacccttgattgtcttatctgtcaaacatggtaaagtcatacctctttcatagggctgtcgtgagtatcaaatgagatgcaggttgcgtaatcccaaatccaaaaatccaaaatccaaaacacttctggtcccaggcatcttggataagggatactaaacctgtaatgcacgtaaagcacctttaggacaatggtccttactgctggcctgcaataagcacttaataaatgttattattttcttcttttttggtgttggtttgctcttctataatgttacaatgctattttgttaaccttctagttgtaaaaacacactcattatagaaagtttagagactgaagaaaagcttaaagaagaaaatgtctcttacaactcttccaccccccccagcaataataattacattttaacatttccttccagttttttaatacttagatattattttacacagctgagatcattctgcatgcataataaatcttgattttttttcacttaacatatcttaaacattttctcatatcattaaaaacacttgtgaaatcatttttaagggtcacatagtagcccatcacattacattcttttgattgatttaatcatcctctttttacttggcatttaacatttggggcttttttggttggagttgggttgttttcaggtcgttctaatatattaagccaggcttttttcttgtcaacaggaggtttggggattgagtctttgtgattgtttttattgttgcatttttttgcctgttgagtgtgtgaattaagctggggttttaaccatcagcacctgcgctctcagactcttgccaccacctttctggacaatctccatgctctgctttttaaactttttctgatgagtttcttttcttctgtgctagaagaaagatgaatggagactatgtttggtgtttaggtttctgacccggcagtgccatgtgaatgcccagtagctagccaaggtcaacagcactgcctgttaatggctttttactgaagtagtcctgtcgagcagtttctggtgagaagactatcctaaattgttcttgacagggtacactatttttgtttcaacttcttatttttcctgtaaagcttggtttaaagtatgttgagactgaatttatttgtgctttggaatataatgagattttgtgctcttttctttcagaaaactagccaagaacagcagtctggaaaagacatatgtatccaaaattgccagggaaacctgctgtgtagatacgctttctgagaaaccacatggtaaatgaatgtcatctttgtctcagaaccacagtagcctggttctgctggtggatcgtgctagctgatttgagctgggtttttaactcagttattgaaatggctttgagagcaggacttaaatgcctgcggtttttgacctcaagaggttgcttaaaacagtatcagcctgtgtgagcctgagactgtttttcatttcctttgtttggttcggagactgcttgatccatggctgcttggcaggcttcttctttagcgttcattcttgtggccatttattctctgatattaaactacaggataattttaatctcaactacatggtgagaaaaagagctgagtccagactggctcagaaatggagcctaagaactgcaataagtatcctagcaccttaggccctaggaaggactgttccatagttaacttctgtgtggcttcactgtaagcacaggtgacagatgggcatgtcttgaattcctagaagccattgtctctctcaatcatctgttccaacactgtatcagagaatgataaactttcagaattgaaaagggtcttaaaggacatattttccagctcttgctatatttccaacaagaggcatcatctcacatttgcttgactacctgcagtcatttctgagaagagggaattccacaagttggaagtagttcaaatcattgctcaaagctgtgtgtaaagatagtagtttttttttgttttttgttttttttttcagccaaaatttgtccccagggaacctctatccatgaaattttgattacttctcacaggaactttagcaaaagttagttgggattgtctggattttccgttttgcagatagagaaagccaccatctctttcccctaactacttagtactatggtaacttgggtttaggaaaatttgccagttcattgttaccaaggcaagtgactaaatcgtgggttctctgtatgctaatgctgccccgcatataggctttactgctgtccgtgcttcattctctctctgtttagctgagaaaatgagtgtgaaagcacttagccaatagtagtagatgttgggtgacatttcattaaaagtgcagactcctggccaggtgcggggctcacatctgtaatcctagcactttgagaggccaaagcgggaggatccctcgagcccaggagtttgagaccagcctgaccaatgtagctagaccttgtctctacaaaaaattaaaaaattagccaggcatggtggtgcccacctgtagtcctgctactcaagaggctgaggcaggaggatcacttgaacccggagtttgaggctgcagtaagctatgattgcaccactgcactctagcctgggcaacagtgggacaccctatcttttttttttttttttttcaaaaaaaaaaaaaaaggaaaaagtacagaccccagagtcagacagaacctgattcaattttgatttcaaccacttgcgggctgtgttaacctcaatggattatataattcttcaaacctcaaattccccatctgtagcactgggttaataattatagctgtaagatttaatgaagagcaaatgagattaatacatataaaatacttaatgtatggctgctaataatgaacagttaatgcttaaaaaattctggcttttattattgctattgttactattcctgtaatcactgtccaacaaggtccctgaatctgccctctcattaaggcaatacaggcagagcttaaccttctctcccacctgtccttgtgatttcttctctccataggactacccttggtattcattttcacctgatttaccaagaatagcaatataagcatcaaaagaaggggtggggatgggcatgtacacaatttctctggcccctggatatccctgcttctcttacatggggaggtttcaggagtgaccttgttactctgccgtgttgtcagaactggaggttgggcgttaacttattttttctcattttcctgcctttagggaaaacacgtatattcagaaatatcatggttgtctctattttcagagatggtttcatcctctgtggctctgtcatttgagtatgtgtttttaacaatctactcattccactttgtccttgtggtctagatttcttagtagtcagttttgtttggtttcactccagatgtaggtctctgccgcttcccaagacatcttaatttcatgcacatttaaaaatttattggcatcaagtttcagattttaaaatttgcagtatctgtatttatagcttgcttttcattcctgttatttgtttcttcttttttttccggggggtggggatcagtcttatcaaagtgtaattttttttttaagcccaaaccagcttttggttttgttgatccttgctactgcacattaacttttgaattcattaatttatgttcttacatcattttcttctttctgctttctatgggtttatttctcttttcttcacttggacaattcagcttactaatttttaattatctttcttttctttttctttctttctttcttttttttttgttttctttttccccgagacggagtcttgcactgttgcccaggctggagtgcagtggcatgatcttggctcactgcaatctttgcctcccaggttcaagcaattctcctgtctcagcctcccgagtagctgggactagaggtgcacaccaccatgcctggctaatttttgtatttttaggagagacggggtttcaccatgttggccaggctggtctggaactcctgacctcatgatctgcctgcctcggcctcttaaagtgttgggattaccagcgtgagcccccgcgccgggcccaattatctttcttttctaacatacatttaaggctgtaaaatttcctttaaatactatttcaactacctgccacaattttttgctatgtaatatttttgtaaagtcagatttgttgaggtttaatttatatgctatagaacatgctccttttaagtgtacagttggatgagttttaatagaaatatacagttgtataaataccaccataatcaagctatagaacatttctaatatcccatcaagttcccttatgccctgttttttgtccctaaagttttgtcttttctgggatgtcagatgaatggaattgtgcagtatatagccttttgtgtttggcctcattcacttagcatactgttctgagatttgttcatttgttgcatatgtctggagtttgttcctttttattgctgagtagtttccattgtatggatattaccagaatttatctgttcactactactttattttcagtgggagaaaatgagagtattttaattctgcatttggactgtaaatatcatccagactcttctggattggaaagtatcttggcatttttcaaatacaaatatttatttaggttttatcattttgaaagttcttccattagtgggcaaacatgagctcatgtgtattcacttgcacgcttcctcctgtagcagtctgggttcagagaggagatagaaaccacacagtagattaaagaggggaaatttaatataataagtattacctatgataaaagagtaactatcagatatgaagaaactctgtagcgttccctaaggctgagggcgtatatccaaggaaggacaaactgccagggcttcagacttcattggagaagatgtggttcagcccatggaatcacagaggagtttgctggtttgacaagactggagctgatccaaagtctctgggcaagccgtcgtttaccttctggagtgctggcagagagcaggccatccagtgggttactggccatccggtgggtagcagggtgtgggccctggctgggccaggaggcctttagaacacaagagccatgtggaggctttagtggccatgtcagctgagctcccaaaacgttaggataggctgagtctgcaaggtcacagaaagaccacgttctaggctgtcgctgggccacagtgtcgatggtcctcacacccacattgccatctcccatgctggacacttaggacagcctcttcctcccagtgctctactgagaaaacttcacagcacacgttcttcagagaaatgattatcacagaatgcatctagaagggtgcacttggatcttagaggtaacacactatccctattcttttaaaaagaagtgctatcaagtcaagagcagtaataactatatgcttgtgttattaacaatcagacccttcatgaggggaaaagagtttatgaaaattagaacttacgtagttttaagtaacaaagatatgtttatagacaaatagaactataccttcccatgggacctgtgttatatactaatcatgatattgtccctattctcccctctcccagtcattggaatcatagattccaagttgtaagtcagaccccagattggaagcactttctttgttcaagatgtttgctcattatagaaaacatttaggaagcacattttaaagaacggttttataccagagaagctaagtgtttttaactctgagcctagatgagcttactgctaggagtatagtgtttaaacctttcaaaatgaaaaactaggacacatggtctttacaaaatttttttctggtttaggaatttatacacatttgagaagtattaccatggcataaattaattcacatttgattataccaattaaacagttgccgaaaagaataaaagactatcctaaaatatttaggctatatacatactaatgcttttacagaataaggattaaacaaacctatcttttttagagtcttcaaccagaaaaatgaacaaatgataaaaacttatatttagcagtttgaaggtcacacacacacacacacacacacacacacacacacccctacccctatctagacctattttatgtttttgacactgtagagagttcaagtcctaagactttatggccattataaaaagattctgacatgctttgtggaattcttgtctgcttttgttgcagatttttttttttctttcaaaggattgcttgagagggtatttcttttttgggtatttaggttgtgaatctcacccttcattacatgggagtacccagcagtaaggcttacagagtgttatatactttccagaaactgagtgctatgtacttgcaatcttttccacgctaagaaatccccaattttaaaacttcaacctgcaaagtagcttacttagggaatttctatttgtattcttgacaagttttctgtaagcattcttttttcttttatgtgtttaaaattggatcctatttagtctgaagatgccttttaagactgcatctattaaataaagtgagatcaatttgcattttagctttcaaattttgctggggattctttgggctttttttatttggcaggaagagagagaagcagcttggcctttttgctatctcggaaatttccagcccaagaaagcatacagagacatagctcgcagggtttcttatgtgattagctagctcttttcctgaattattaagctgcattaaaacagtagctcggtgcagttggtgttttaggttttcataccttctgaaagattaatattcctacaagaatgaggttatttttgatgcctccctttagtgctttcaaacatcaagagcctcgcattcttgtactctaccttctgtagacatttacaattattctaggaggtgtaatgggtgtttactaacttcctgaaagtgtttctctcacagattggcttccttaagtgtgaaatttatacaccaatttaaaactacagtgtcccccttgtcaatgggggaatatgttccaagaccccccactggacacctgaaactgtagatagtactgaaccccattgccatcagtcagaacgtttctgttcatgtctttcacccacaaatttaatcccttttctatcttaaccaagcgcttatcacacaactgtggttgaaacttttgctccttgaggtatgacagcaaaactagcatgtatttctttttccttcttcacagtatcatgggtagaagattcattcttactgtaatcttagcagccttagtgtatgattttttgttgttagccaacaatgttcatcttttcacttaaaggaagcacatcatggtttctcttcggcatatgtgaattgccagcatcactactcttgcattttgggtctattattaagtgaaataagggttccctgaacacaaatactgtgataccaattctgcaacagtccatttgataaccagggtgactactgagtgactgaggggtggatagtgtgtatagcatggttatgctggacaaagggatgattcacatcccaagcgggatagagcaggacagcgcaggatttcatcatgcgtctcagaatggcacacagttaaaacttaggaattgattatttctggaagtttccatttaatattttcagactttggttgactgtgggtaactgaaactacagataagggggaatataatatactcttaaaatagaatttttcttaaagagcaatcataagcaaccaggactagagaatttttttcatttttttccttgtaattttattgcaagtaggatactgaattagttgcttattttgattttggtatgcatggatcaattttgagtaattgatacaactttatttaatgaacttaaattatcctcttaggcttatgtattgattacatactttcaaagctgaaatgcttgagagaacccagtaaaaagtcagtatcattttcaaacaaaggcttaaagattaaggatctatttctttattaaatatttattaagaattattttttgctggcctgctctctgaaaatatattagatatagtctttaatctcaaataggtcctactttagtaaaagaaaaagatacaggattgagagaggagttggagcttgtgctgagctggaaggttgaatgggcagccccctaagcagaagacagaattagatccagcagaagcttggaggtgtaaaaaagcatggcacctgaaggaattgggagttgttgttagtatttctgactaatgagctcataagtcttttcgtttatttaacctaatttgattagttctctgtatctcaaatgtgttacttgatataaccaaacttgcatttcatttttaaaagttaaaattcagacctttccctgatttagaatgaccccctcttctctgcactataaatgtgtgacgagataaagttttttttcccatagactctgaccacagggattcttccatctgtcaattcctatagcacatgttgccttgacacacagttggccaggctttacagtcagacacgctaaggttcctatcctaattcaaccacttacaacctctgggaccagaggcaaatgcctatatctctctaagcctccagtgtctgcgtctgtaagatgaggggtaagagcacttatttcttggactgttgtgaggattactcgagataatgcatgtaaggtgctgagcacaatgtccagcacatagaactcaattaaaagtatctctaattaatgttagtgatcattagccctcactaataccctagactgtagcttgttttcatgacttccctacctcttttctctccacaactagcgtgaagggagcatgccatatactttttttgtcccatacccactcttactcacccatactcctcgatccttacatgggttctgacacagagtgggtactggctacatttttaaaaagatgtaatgctagatatcagcaagtaaaccttgggggataggaaagtttctgatgggttcttgctgtggagaatcaaggtcaaaatgatagggaaaaaaatctgtgtttggtcaaaactgtattacctttggtcaaaggctgttctaaaactcacagaacaaaaacaaaacaaaacaaaacaggtgctttgtgaattccatagcaagtcgtaaaggctcatgccagaatagagttggaataaattctaagcatgcaaaatactactttaagaattttgtcctgtaaatttgagaatgttttttaattacggtagctcccaaaccttaactatggttttgctttccatggcttcagttacccacaaccaccgaatattaaatagaaaattccagaaataaacaattcatgaattttaaattatgcgtcatcctgagtagtatgaggaaaccttgtgccatcctgctccatcctgcctgggacatgaatcattgctctgttcagcatatccactcggttgcacccattagtcacttagtaggcatcttggttatcataaagactgttgtggtattggtattacagtgcttctgtttaacccttttgttttattttagtatggaaatttttttttttttttttacttttaggttcaggggtacatgtgcagttttttacataggtaaactgcatgtctctgaggtttgatgtagattatttcatcaccaagtaattagcatagtacccaataggtgatttattgatcttttcccttctcccactctccaccctccagtaatcctcagtgtctattgttcacctgtatgtactcatgtttttgttgtttagataagtgagaacatgcagtatttgtttttcttttcttttcttcttcttcttctttttttttttttttttttttgagatggagtcttgctctgtctgtcgcccacgctggagtgcagtggggcgatctcagctcactgcaacccccgtctcttgagttcaagcaattctcctgcttcagcctcctaagtagctgggattacaggcatgtgccaccacacccagctaatttttgtatttttagtagaaacagggtttcatcatgttggccaccctggtctgaaattcctgacctcaaatgatcctcccaccttggcttcccaaagtgctgggattacaggtgtgagccaccgtgcctggcctcagtatttgtttttctgttcctgtgttagtttgcttaagataatggcctccaactccatccatgttgctgcagaggacatgatcttgttcttttttatggctacacagcattccatggtgtatatggaccatattttctttatccagtctaccgttgatgagcatttaggttaatgccatgtctttgctattgtgaatagtgctgtgatgaacattattgtgcatgtgtcttcatgatttatattcctttaggcatatacccagcaatgggattgctgggccaaatggtaatgctgttttaagttctttgaggaatcaccacgctgctttctgcaatagctgaactaatttacattcccaccagcagtgtgtaagcattctcttttctccacaacctcgccagcatctgttattttttgactttttagtaatagcaaaaaattctgactgatgtgagacgataatcttactgtggggtttttttttgttttgttttgagacggagtctcgctttgtcgcccaggctggagtgcccagctttgtcgcccaggctggagcgcgatcttggctcactgcaagctccgcctcccgggttcacgccattccccggcctcagcctcccaagtagctgggactacaggcgcccaccaccacgcccggctattttttttttttttttttttgtatttttagtagagacagggtttcaccatgttagccagaacggtctcaatctcctgacctcgtgatccgcccgcctcggcctcccaaagtgctgggattacaggtgtgagccaccgcacccggccttttttttttttttttttttttttttttttggacacagggtcttgcctgtgtcactcaggctggagtgcggtggtgtgatcatggctcactgcagcctcgacctcctgggctcagttgatccacccatctcagcctcctgagtagctgggactacagggatgtgccactacacctggctaattgtttttgtatttttttgtagagatggggtttcaccatgtttcccaggctggtctcaaactactaggctcaagtgatccgcccacctcagcctcccaaagtgtgattacaggtgtgagccactgcacctggcctcattgtggttttcatttgcatttctctaatgattaatgatgttgagcactttgaatatgcttgttggccacatgtacattttcttttgaaaagtgtctgttcatgtcctctgcccactttttaacaggaaggtttgttttttgcttataaattcgtttaagttccttgtggattctggatattagatctttgttggatgcatagtttgcaaatatttcctcccattctgtaagttgtctgtttactcccttgatagtttacctcttgctgtgcagaagctctttagtttaatttggtttcatttgttgatttttgtttttgttgcagttgcttttggtgtcttcgtcatgaaatctttgccaggtcctatgtccagagtggtatttcctaggttatcttccatggtttttatagttttagattttacttttaagtctttaatttatctcaacttgatttttgtgtatgatataaggaaggggggggtccagtgtttttatttatttatttatttatttttgagacggagtctcgctctgtcacccaggctggagtgcagtggtgtgatctcggctcactgcaagctccacctcccgggttcacgccattcttctgcctcagcctcccgagtagctgggaatacaggcgcccgccactatgcccggctaattttttgtatgttttaggagagacggggtttcactgtgttagccaggatggtctcgatctcttgacctcgtgatctgcccacctcagcctcccaaagtgctgggattacaggcgtgagccactgcgcccggccaagggggggggtccagttttaatcttctgcatatggctagccaattatcccaggaccatttattgaatagggattcctttccccattgcttgtttttgtcagctttgtcgacgatcacttggttgtaggtatacagccttatttctaggctttctgttctgtcccactgatctgtatgtctgtttttgtaccagtgccatgctggtttggttactgtagccttgtagcctagtttgaatttggttaaaccaacttcaaacctgcagctttgttttttttttgcttagcattgccttggtgttttgggcttttaaaaaattctgtatgaatttttaaactgtttttttctaattctgtgaagaatgtcattagtaatttgataggaatagcattgaatctgtaaattgctttgggcagtatagccatgttaacaatgattcttcccatctatgaacatggaatgttttttcatttgttggtgtcatctttgatttctttgagcactgttttataattctttaagtagagatctttcacttccctggttagctgtattctattcacatatcttttatttccctggtattttatttttttgtggctattgtgaatgggactgagttattgatttggttctcagtttggacattggtatataacaatgctacttattatatttttgtacattgattttatatactgaaactttgctgaagtggtttatcagatcaaggagcttttgggcaaagtctatagggttttctatgtatagaattatattgtctgcaaacagatagtttgacttcccttcttcctgtttggatgtcttgtatttctttctcttgtctcattgctctgggaggacttccagtactgttgaataggagtggtgagaaagggcatccttgacttgttctggttttcagagggaatgcttccaacttttgcccatttagtatgatgtttgctgtgggtttttagtaaatgggtattactattttgaagtagtttcttcagttactagtttgttgaggttttttttttttaacatgaagggatgttgaattgcatcaaaagccttttctgcatctgaagtaatcatgtggtttttgtttttagttctgtttatatgatgaatcacatttattgatttgtgtatgttgaaccaatcttgcatctcagggataaagactacttgatagtggtggattaacctttttatgtgccgctggattcgatttgctagtattttgttgaggattttcacatccatgttcctcgagaaaaatggcctgaagtttttttgtttttgtttttgttttttggtggttgttgttgttgtatctctgtcaggttttggtgtctggatgatagacatagatggacacctcatagaataggttagggaggagtccctcctcctcaattttctggaatagtttcagtaggattggtaccaactcttccttatacatctgatagaattcagctgtgaatccatctggtcctggtcctggttctacattttgtagcttgtgagtatagaggtgttcataataggttctgggaattttttgtatttctgtgaggtcagtggtaatgtcctctttgtcatttctgattttgtttatttggctcttctctctttttttattagtctagctagtggtccatctatcttattatttatttatttattttttttcagaaaaccaattcctggattcattggtcttttgcatgttttttcacatctcagtttccttcagttcagctttgattttggttatttatttttgttagctttggggttggtttgcttttctttctctagttcctctagtttatatgagtaacccttattttacttaataatggccccaaagcataagagttgtgatgctggcaatttggatttgccaaagagaagctgtaaaatgcttccttgtttatctcttactgtgcctaatttaaaaattaaactttatcataggtatatatgtataggaaaaaattgtgtatgtgtatatatatacacacattatatacatatgtatatacacattatatatctacacacacacacacacacacacacacacacacagatatctagctagatagtaccaaaatatatacatctgtggttttggacatccactggaatgtatcccttgtggataggggggactactgtaatcacaaaaaactaacagtatgcaagtacttcatattttataaaatgttatttaaagaagaaaacttgttttttgtgtttgccatttattaaatcatattctttatacatacacgtgtgtacacgcacgatgtactgagtctcctctctaggctctgtggacaaagtctttgggttatttgaacgcagtcttctaagagatccgtgtcagaggtcttgtcattacatcaccatgcctgcttgaagccagatttctttgattcacccaggcttatgatctgcatttcattccagtcttcttggtaaatattttttatatatgtggtcaagttctctttgtttggaattttgataatgagaactgcaagtgttgattaattataaacctaaaatgggattgaggcaattgttaactcgtcgtggttttgctgctttccctccttattggagaagaattaggaagactttataggggactgatggaaaaataatttggcatgaccataatttgagtcagagaaagtctcttattaaaattcccacaaggcttatttaaggagcaagatcttttgaaactaatggtgtggtacttacttaatccacacaagttatgatttgattgtcatcttctttgatttttctgcttggctttctgtcatctgatgagagattactgcattacctgagaatctcatcttattagagtcacctctacctaaactagaatccattcctaaatagtaacatactcgcatcaagaaagagtaagtatcctcggtactaaattagtgctctagatgcctttgtacattttttttgttgcacttttccggactttctagtggccagtgttgaggtatgggatggtatgatggtggcttcattcaactttttagcttctatcgagcttccctgtcatcttgctaaattccaaaggtgtgttctttcctcattcttggtcacaacaaaacatcacctgagacgggatcagtctgactcgcccaaccagaagggatgatgtgtttgagaaatcctgtttgtgacactggaggaagaattgtgactgttcatatatgatacatatggaattgaaacttgtccttaaaagctctggcaggtctctctttgatggtttttagggacaatagacttttgaggtgagagtttgtagtggcagaggagcagaactttgaaataggcctaaaccctgtactttggatatgggccagacccatttgtgttccctatggggctggttgacaagggaagaggaagctctactatacattctcatgtgtttagtgtagcttaactctgctgattcaagatgggctaattgtcagtgtaattcctttgaattatctctgtgatgaagtatcagctggagcttgccagtggcactctgggccaattatgcagccgactttgaaaaatggtatgattcagaatgtcagagttgctaaggtgatttatgaagaaatcagttcccatcagccttcattattcatagagatgctgggaatcaggactttgcagtgacctggcccagaggaaataaaccaggtgggtatgatttagggtttctcacatagagttcaatagaggtgcctctgtgtatgtggtatgtgtcctgtaccgtgttgtgagctcatcttagagcaacagcagctattatttacattacatacttcctccatttcccaaaaaaggatataaggtggtagccttcacttacccactttctttctggtggatgcatgacattatgttatataccttaccaatacctccaaacctcacaaccgctgttgtagaacgaataatgtcctccattgaaaaatgagaaaattgaggcacatattagatgatttatgcaaaggcatccaactaccaagggcagaactcgtatagaacccggtccatctgacttaacaccagtgctcttgcccctaacctgagctgcttctctgacaggtgtattgccctttatattcatgttgcccagcagtgttcctggcctagcgtagctgccaataaaattgattgatttgatttgaatcatattcagcaccctggagtcactgcacgtcagcagcagcaccatgtgtgtagtaggcacttggtgcctactacaaaaggcacaaaagcagcaaagtagatagcatacccattttacagatgagaaaacggaatctcagagaggacaagtaacttgcctaaagtcacccgttaccactagtggcatttctgaatgtgagggccatctgatgtatctaatatcagctaaattcataattcttccagtcttccacatttttcacaaacacactcccatttccagaaacccttcatgtttcttccagttgcttgttgtctcttctaattccttgttgtatcacttaaattattttcccactcttatcctcagtgacctcatctctaaaaggaggataatgatgatacctaccttacagatggattaaataaaatagtgcagacaaaatgttgagttcagcatttaacagatgcaaatggtgaagtaattaacatacttcttccatatctatgtgtagaatccaacagtaacacagcatttgtatcctgctaacagagtgaggctgaactttaaactaaaaatatgtctactttaagatacaacacatttccagagatcacatcttttaagagaaatctcatctgcacaaatgttgttgcttttacttattcagacatcctttggcagacatcagacctcatcagactgggtaaaggcgatggtgagggaattctaggtgttagacaatagtgagtgagttcccataagacattagtactgtcaggctcggagcccgtcctcttcctttacccaagactgatgtgttgcttagccttatgatggcaaggaaattctaaataaccatgattaagaggcttattttagtttctccttccactgtgatctctcccagaaagagactcagaaatccttatacttggtctgatctcttcagcaaaacccaccttcagtagcaagcctgtggctctagggttggcccttattttgtcttgtccagcaggatggtgtctcttattcttttgatgatctcattctttccaaagtgtatttcttataacagaagttcttttttgtttgaataaacagtttaaatggacatgcctttagagataacttagccaggactggagccctgcttcttatcagacattacaaaacacagacattctcattaagtgaacagagatttcctttgatttcaaaagaatgttaaggggaattacttttaagtttaaaagctccttgagggcagaacgcacttcttattctacactgactcttcttagcacccatccagaaccttgttgcatatgatgatgccccatgtaagcttgcttcattggtttcagtggcttttgttcttagttgactagaaatgaaggataatttattcatttcttcaaccagtattacgtttagcatagtaaacaagacaaggtcaatcccttacagaacttatatcctagtaagagagacaagtaaaagaaaataaataaaaataattacaaggtacataattgttttgaagaaaacaagagtctgagatagaggataatggagaggaggcagtctttctagataagatggtcagaaaaggcttgcctgcatcctctgaggagttgacatctaaactaaaacctgtaggttaaggaagaacagggcatgaaccatgcaggcagaagattcattaactctgtaggccactgaggctggaaaaagtatggcctgtttgaggatctgaaataaagtgtagctgtagggtcctgagcaaaagagggagtaatagattatgaagttggaggggaggcaggggccagccatatgaggcccatgtagccactcatgagttggattttattctcagtgcaataggaaagaaacctaagggtgaggtgattggattcatttctgtgtttttaattatgtttgttgctgtgagatgatggcagcctggaccaaggtagatggagatggaaaaaagtggttgggtttgagttataccaatatttcagggacaaaattgataggactgctaaaggattggatgttggcaggaggcgggggtgagggaaaaggaaggatcagggatgattttgagcaaatggaagaatgatgataccattcctgagatggggaagactggggagtaaggagacaagatttggggatgaggaagggatgtgactcaagagttttgctttggatgtgttaagctgcagattctattagcgtggtggctcacacctgtaatcccagcactttgggaggccaaggtgggcagatcacctgaggtcaggagtttgagaccagcctggccaacatggcgaaaccctgtctctactaaaaatacaaaaatctagccgagcgcaggtggcaggcgcctgtaatcccagctacttgggaggctgaggcaggagaatcgcttgaacccaggaggcagaggttgcagtgagctgagatcttgctgctgcacttgcctgggggacagagccagactccgtctcaaaaaaaaaaaaaaaaaaatcagatctcatcaggcttactatcattagaatagcatgggaaagacctgaccatgctatttaattaccaagatttaattactttccactggatccgtcccataacatgttggaattgtgggagctaccattcaagatgagatttgggtggggacacagccaaaccatatcacagatttttcacgagataatcagggactgaaatatccagtgggagctgatctggatgtgcgagtatggagtatgggtatcacagaatagagaggatattcacatcctatgggatagatgaggtactgaatgggtgatatttcccatacctcgtgaaaacagctcaagctacttacatggctggattgagaatttgctgcttcaagattctggctgtagcaaaactgtagaatcacagttattttactgcaagatattcatttgaaatgtatttatgccaccaaggaccaggaaggtgaaatgctacacttggcgccatgaaactattgtctgagcttgtttttcggaaaaatccatatctggatgatatgactgagtcatcagcagtgcctggctggctgtgttgtaataggtcagatgtaacttaagccccaaagttcttaggacagccataaattagtctgaaggtggctgagataaggcaagggtgcttgttgcctccagattagaatcaagggcaacaaaactgcctagaaattggaaacccaggagaagctttaggctagagacaggcagcaatactttgtgagaattttactaacagaaaaataaggaagatacagaatcatgtttatcaaacttgaggatttataagaaatacctgtatagcttctttattttagtttatttttattattatttatttatttttgagacaaggtcttgctctgttgcccaggctggagtgcagtggctcagtcacagctcactgcagccttggagtgggctcaagcgatcctcccatctcagcatcctaagtatctgggactataggtgtgcaccaccacacctggctaattttttttcccccgtagagatgggatttcactatttgcccaggctggtctggagttcctgggctcaagcaatcctcccaccttggtctcccagagtgctgggattcaggcatgagctaccatgcccagcgtgaataccttcttcaaaatgcaaaatcctgtacctcacctcccagggagtcttattaagtagctttggactggggctcaggaatctgtgtttttagcaagtgattctgatacaggtgatccataggtcatacactgagaaacattgagtctggaaagacttctgagatcatctagtcagccctgtcttacaaatggggaaattaaggtctgaggaggagaacgggcttgcccaaagttgcagaataagttgcaaagtcagtgcagctccactaacttatatgtcttcattttgcaatttattcttcatcctagtggctagatgaaaagcaagtctaccctcctaattcccagctccccttctttcacactattttttattttcttttttccagagcaccttctaatataaaaataatttactaatttactgtgtttattgctattttccttgcttcattaaaatgtaagcttcacaagggcactgctttttgtttgtttgtttgttttcattaaagtagcctatgtgcctcgaatagcacctgacccatagtaggtgttcaatgagtatttataaatggatgggtgaaaaatattttgttaaactgtacataagttaacaggtattatgtaccagcccttaggcattagcatgaaatagagtagaatattttctttttcacatgtttgattctagcttgaattagaggttacagaaacagcttatttatggaagattaattagagacttaccaatcatatgtacaataataataagaataacaatagcaacaataacaacagtgataacatccatttgtggaatatttactatctgcccaacacatactatatgaagttctgagctaagaccatcagaccattatctcatgtaagtcttagtaccgccccagggtggaggaacaaaatagtattgtctgttttccaaaggaggaaaccgaggctcaagaggtgaaattactgtttaaggttacatagccagtacagatttaggacctgtgatcccaaagattacattcttaactaccagttacattcagtagtaggcttggggaattctctctttgcagaaggaattgaaaatgccaaagactaggcaagcattgctattaggggtgtccttgggccaagaacaccaacctctaaggtagtataaaaccacaggctggaaagatgcattttttttttcagcccgactttccagcatttacccacactctcaagtcttccattctcacattacaaagaacctttcgtcttgaactattagggttttctcacttctcagacaccctccctgaagcaggccaaggaaaattcctgtggtgacaggccatttctagggaggccactgtagcacttcacacttgctctcaccccacccactcaaggaagggtagacagacagagggccctttacccagctcctatactactttcctgtggagacctcaggaaagggccgaggatcatgattttctaaatgtgggcacaacagacctcttgtaagactttgagttcttgaaacactgtacctattaaactggttgtgagcacacagaataaagtatcaccacccactgtggataatgtcagcattcattcccacccctgacagccaatattggccaggcttggaatcactgaacacacatggcagcagagtcccttgccccatagctgcagacacaggttgaacactggtgtatccctgggcttttatgaagagagaggcttataacacccattgccatctttacacacacagtgcagcaggtactgtgctgagaactttacagccgtgatcttatttaattcttacaatacatgtgatgagacactgctgtctgacttctgtagatggggaaggcctggagagattggtaacttgacagagtctcatggcatctgcaacaggcagaaccacattttaaacaaaggttgagttacttctaaaacctgtgctttgctagtcttctgttctgcaacactggttaagagcatagactctagagccatgctgcctgggtttgagtcttgattctgccacttactagttgggagacattgggcaggttacttagctaccctcctccttgggctgttcatctgtaacatagggataataatgtccttgtagcatgggttgctctgaggattaaaggaatccatatatgtaaagcactcagtgtctggtgcatagaaaacactaaatgccagccattattattaatttatatatcaactcattgtttttctttggatgatagaaacttaatctcagaagtttgaggtttttctaactacccacccttaccccaacccctgccaagggttgcgtctgtattcccaaggggcttagactgttacctggtatatagtagcctcaagtaaatgctggtgatgataatagggcagtgccaagacattgggggtgtgggaaggcagggttaggggatggcatctgcgcctcatcagcatcgatcctccatggtgtcgtatcctgaaagtgggaaaggcgctgtccagatagacgcttatctcgtagacagaacaagaacggggaggcaaccattatttcacatacagcaagttactgttattttaatgccctaacaatgaatctatatttaattaacttaaaagataggggaggtgagagtattattcactaagttcttggtcaaggcacattaaatcaaagcggttagcacttagatctcttccagggataaattatctcagacaagcttcaaggtatgccatgctttggaatgaattgtcactttccaaccaccaccactcaacctgtgatctgaccacagtgtcttcctcctgtctcccttccctctgggtgcctgggaaggctgggcttctgcactgttctgccactgacttaagctttgtcgtgactataccttccacttctcttctagcttaagagttggacagtggaggaccttcagaagaggctcttggccctggaccccatgatggagcaggagattgaagagatccggcagaagtaccagtccaagcggcagcccatcctggatgccatagaggctaagaagagacggcaacaaaacttctgagcaaggccaggctgtgagggccccagctccacccaggctttgggtgaattctggatggcttgcctcatgtttgttagccagcacttctgctctgtcgtctctccacagcacctttgtgaactcaggaatgtgcgccagtgggaagggctctcttgacagtcagcgtgccatcttgatgtgtgtatgtacattggtcaggtatattatctcaaaggatttatattggcgcttttaactcagagttttaaaccccaggaacagagactcctagttgagtgatagctgggaaagttttacattgtctgtttttcttctcccaatagctttcaattgttctttctggaagacttttaaaaaaatataaatatgcatatatatatataaattataaatagattccccacgcagtgtggtggcatctctgtacaggtacagttttaaacggtttgcctcttttctgtaagattatggtactgtggaacatgagggcagaggacaccgggaggctgttagggggtcactgaatcccaggagccaacctccccctttgcagggctgcatttaaaaattaggtttgggacagttcttgtaccgtggtttcagccttgtgtggtcatcactggcttctggagctattggtgatgtccaagggaaagctttgagagtttatgtttactctttgagtcccaggagaagcctggcaccctctttgcaaattggcctttgctctttcaatgcctttcatccatctccactctctcaactgcctaaagtcacagcacagatactgcccagtgccttaagaggagacatgatctctaccagggactctcagcaaacacgggactgtgttcagtccacaaaggaaaagcgtttttgaagctctcattgttcatgtaaaaatcatacacgtggcatgttgctccacattccttacacacaggggtagaggggattgcttttgtgacccacgttcaaatatgtgactgttttcttttctcttttactgctaagcagcctggaaaggataaatgaatattagactaagatttgttttccaggaggctcaatctgaacacacagaatgtcagagctggaagggactatagagatcatctgatctgatcctcttgtacggatgatcgcaaaactgaggtgtagagaggggaatggccaaaatcacaaagcaagttagcgttaagagctgagactagaattcagggtcctcactcccaggccaccgaaccatgcagccccttctttgggggaagagacctgtgtcagtcttggttaattgttccagggaaccttgctaacagaaacttgctcttgccttggctcttcagtagatgacctggctgtaaagagattccctggacgagccagatcattcagtttcagcgagtccttgagctccacaacatctaccagatatagcagacaagcacccatggaggcaggtttcgggcctgaagcagatcagagggctttgcaaaagacagcatagagccatcttcctgcaactttacctctttccctcagatggggagccatgactgggttgcacctcaggatactgtaatttgactccataattgcttttgctcctgaaacctgggaatcaatggaaaggcagggaatgtgcctcttctgtggccagattctgttatttgcaattaaagcaagtttttaaaaaatgcaagaggcagttgttagtcttcagggcttggcaactgaaatagctatgtggcggatacggaaaacagaggacaatttgaggatcttgctggaataataaatgacagctaccatttgttgagcacctattatatatcaggcactgagctgggtaggctctaaacttcacaataaccctgtgacttaactactttatctccattttgtagttgaagaaataagttcagagagaaagattccttcccaaggtcatgcagctagtaaatgatagaatcaggattcatagcatcactatagggggtcaatatttacacaaaaaaggaaagtcacaagcctgtttaaaatgaagtgaccaccttttcttgcatagactaaataactcgaactggcatttttaggttggaaagacagctgaattagtagttaagtctgatagccaagtaagttttaaaaaccaaagcatccaggatgcacacccctgcaccatttgctgtgcgaattaatagttctgtctctctctctctttcttttttctttttattctttgagatggattttcgctcttgtcgcccaggctggagtacaatggcacgatcttggctcactgcaacctccgcctcccgggttcaagcgattcttctgctgggattacagcatatgccaccatgcccagattatttttttgtatttgtagtagagacggggtttcaccatgtcagtcaggctggtcttgaactcctgacctcaggtgatccacccgcctcagcctcccacactgctgggattacaggcatgagccaccgctcctggcctctctttcttttttaaacaaagaactttgcacttggccagagaggaggagaaagcccattttctcccttcctaagctagatccaaataaaagaaagttcagttttcccccataactattcttgggtcatgaactttgatctggagtttgttttgtttcaggaatgtgtgcacccagcttgctgatccaacaaagtctattgcttaccagtctagcttgatgaagccttttggccagaagtcaatttgttttggatcagagaaatttcctgacaaggtatatttgttttctagtgacagaaaggcaaaggaacaagtcctagttgttgttgttgttgttgaatactaaatttaagatatgtcagcttgctttcaatgagccttgggcttctgttattgcttgagcatttggaactcgagcttccagagaaatttgaggtcctcgcttgttctctgccttcaagaaacaatgacctgattctgtctttaaaaaaaaaaatctcagaattctttttttgtttgtgtttttttttttttttgagacagagtctcactctgttgcccaggctggagtgcagtggcgccatctcggctcactgcaacctccgcctcccaggttcaagcaattctcctgcctcagcctcccaggtagctgccactacaggtgctgcaccaccacgcccggctaatttttgtatttttagtagagacagggtttcaccatattagccaggtgggtcttgaactcctgaccttgtgatccacccgcctcggcctcccaaagtgctgggattacaggcgtgagccaccttgcctggccaaaaatctcagaattctttaagactgttttaattgctccatcagtaattttgaagcactttcctttttttttttttttcccctttttgtccctttccccaagccaccaattggatggatgaatgtttgacggggaagaggaagggtaggaggatgcatggatgagtggatgagtggatcgatggatgtattgataaatagatagaaccagtcatctgaagcaacttaagaattgtagccttgactccttgagactgtagatttcgatccaggaaacatttatttagcacctgccagatgccagaaatttataccatttaaaactcagtaagtcttttaaatatcaggaaggagagaagcgacatcatgatacatcctatgggtattaaaaagccaatagaatattatgaataattttatgctaataaatttaacaacttcaacatcataaacaaattccttgaaaaataaaaagtaccaaaattcattcaagaagaaatagataccagcctgagcaacatggcaaaatcccatctctacaaaacatcaaaaaaaaaaaaaattagtcgggcatggtggtgcacacctgtaatcccagcttgtcaggaggctgaagtgggaggatcacctgagcccagggaggtcaaggatgcagtgagccatggtctcaccactgcactctagcctgggtgacagaatgagaccccgtctcaaaaaaaaagaagaagtagataatctgaatagccctatatctatagaaacttaatagtgctgggagatataggtattattatcctcattttacagatgtgaaaattgaggctcagagaagtaaagtctattgctcaaggtcatgtggctagaatatggcagagccatgattcagatccaggtcttctgattcttattccagtgtcctttctagcataccatgttgcctctaaagattgcagctccttatttactagaaaattgttcctgcccaatctacatctccacctcaccccatcttttcttaagcactatgtttgtgtttttatcagtattatattcattgtctttggaatacatgttcttgtttgtgtttggaaaaaaaatctcttttaccagcttgcactcggaccaacttggaaaaaaaaaagcttaaatgtttttgctatgtacagtttaaaaatgtgaagtttgtagctttaactttttgtaagaaaatctaataacactggcttaagtgctgacttgaaatgctattttgtaaggtttggatgtaagtaatcaattgaggtcagcagtttgtatgagacatagcttcctccattgcccccactccttttttcttttttaagtttgagatgcttcctgtgtttttatgttagaattgttgttctccttcttttcttcttcctatacctcatcacgtttgttttaaataaactgtcctttggaccacaaacccttattaacgagaacctcaatatatagcctggataatggtgttgtgaacaatctttgtgacattgactcagtggtgtgtttattctaagatccaaagctggggagaggttggtaaacttttgttgggcttctattatgtgccagggtactgagctagttatcaggaatataataaagatgaaccagatacagtttttgcagggcatttggggagttagccaagcacaaaaacacacaacattgaacataccatggtagaagaaggtacagggcctgtggatacacagaagagggagtgacggttctgctgggatgtccaaggaaactcttctagaggagacaatataccttgaaactttaaaaatgaagaagagatggctagattaataaagagtaggaagtgagggagagaagacatcctggacagaagagcccgcctgtataaagcctctagtgtgagatgatcaccttggaatccttcatcctcatctgctgctgcacgaagccaggccagacgtggcccagcattcagaggtggaacagcaggttcctgccctggtgtggcccattcttatccaggaatagttctccagcctgaccctaggtttttttttcagccttaaaagttgaccccacggcagagagggaatagagttacattgaaaagtaagtgtagttctcttgagtgaaattgctctacagtatttaatagaatagttccacagtctgtgtatataactgtcatgttattctgtgggcctttcttggagtggggtgataagtgcgtttattgttccctaacttactcacctcactccttgaaatatttagtgtaccttccttcctgtagccagggttgatgacagatgttccttattgatcacactgagaacctatggccagatgaaggaaagaaggaaggatgaagtaagtttatatttattaagcacttattatctgccaggcacaatgcagagccgtttagatgacttcatttgtcttctcacacacactcttaggtaaatgatagtgtaccctttctatagacatatggacttttacagtgtgcagtactgcccaccagggggtgttttggaaatgtatgagagtgtttttgtggtgatagtgattgaggagccttaccagcatttaatgggcaggggcaggtttgctagatgctctgcagtgcattctgggacagtcctgcataacaaacatctgtccggtgtccaacacaacattcagatgttccactggttattaattttggtgaaaattttgtttataaacgtgatactaaaccaaagttcatttacatgtaaacacaaagtactttttatatggttttactgttttgttttttttaagaatgaactatgaagaatggagagacacttgtagtttgttttgtttggacctttactaagagttgttctccatttcagaaaaccacatcatcagtgacagcgatgcttgtgatttttgagtcactcactcaagattggtttagatctgtagctgttgttttcacagaaagtctatgtaacatgtaaacacatggtaatttcagagaatgatgaagtacagcaaaaagaaaagaacagggtaatgggattgagagtaacgtgtgcatgtgtgtgcatgcacatctgtgtatgtgtagggagagatggctttatatagaatgataaacgatgcttctggagaaacgatgtttataatgagaactgcatgacaagaaggaaccagccaggctgaggggacagcaagaacaaagaccctgagataaaaacaaaagtttggcttgttggaagaatggaaggattcttccatggctggaacagtgtgtacaaggtgggtgaaggcaagaatgttcagggccttgtggtccatgggaaggggtttgggtgttattcctgatgagatggagagccgtcaaagggttttaagcaaggaactggcatgatagatttatgcattttgaaactatgccttcatgaaatagtgctcaactttagtcatcaggaaaatacagtcagccctccgtatccatgggttctacatcaaccaaccatggatcaaaaatattagaaaaaaaaaatggcccagcacagtggctcacgcctgtaatctcactttgggaggccaagaactcatttgaggtcaggagttcaaggccagcttggccaacatggtgagaccctgtctctactaaaaatacaaaaattagctgggcatggtggcaggcctgtaatcccagctactcgggaggccgaggcaggagaatcgcttggacccaagaagcagcagttgcagtgagccgagattgtgccactgcactccagcctgggtgacagagcgagactccatctcagaaaagaaaaaaaaattgtgtctgtctttcttccttaaacaatacagtataacagtaatttgcatagcatttacattaggcattttgtgtagcattgtattaggtataagtaatctagaaatgatttaaattatacaggaggatgtgcataggttatatgcaaatactaggacatttcatatcaaggacttgagcatctgcatgcagattttggtatccatcagagttcctggaaccaattcaccacagataccaagggacaactgcacagattaaaaccttaatgcattactaccgtgtacccaccataataactaaaatggaagaaatagaaatgctaggtattggtgacgatatggagcaactggaactcgagtactggtgaatatacccatgacctagcattccttccctaggtattttctcaacagaagtgtgtatgcctttttaccacaagacatatactagaacattcataatggcattatttataattttgccaaactggaaaccatctggatgcccagtggcagcataaataaattacgtagattcgcatagtggaatactatacaacgagaatgagctacctatagctactgtggaaataagcaaaagggtattgtgagcttgctacagcaaagaagtcagccactgttacttgcattttggcagagactcaaaggcaggcaaaggaatgggaaagtagaaaaaaaaggaaggcttcagggatgccctgttggaagctgttggcatgggaaagctgtaggtgggctaacttgaagcaggacatcctatgtgattgatttaggggtgcatatttggtttctctgtttgatcctaagttggaagtggggacaaaaattggggaagctgtcagttattaatcaagtcctgaccattttggcttgattgttacagaagttattgtttagcttcctggattgccactggagatagcaatctgtcttcctgcaagtctgacttatagcaggctggcaacctgggctatttattgtagatatggggttggtttcctgggcaggttactgcaggttgtgggtcaaagttctatttatatatatattctgggattgtccatttgtacattcagtctctcactacatgcaacaatatggctgtatctctcaaacatttaaatgaagctagacacatccatcgatggatgaatgaataaacaaaatagggcctacacatacaatgaaatattattcagccttcaggaggaggaaattctgacacatgctgcaacatggatgaaccttgaggacattatgctaagtgaaataaaccagtcacaaaaggacaaatacatgattggacttacataaggtacctagagtagcaaggtctcttcatagagacaaagtagaatggtggttggcagagggagggagagagggatggggagttagtgtttaatgggcccagagtttcagttgaggaagatgaaaaagctctggagacagatgttcttacaacaatgtgagtgtacttaatgccacagaactttacacttaaaaatggttgaaatggtaaattctatatgtattttgccacaataaaaaatccagatacaaactagtacatactgtgcaattctttttatatacagttcagaaccaaggaaacctactctatgatgttaaaagtcagggcaacgattgcctttgttggttgtggggtagtgactggatgtgagtatgaggagggactacagtgctactcaggttctaattctttgagtgcttgttacacaagtgtgttcatgatgagaaaatttatcaatgtgaactcttaggatctgtgcttttttttcccatatgtattttatacttgaataaacaagactttttgccttctactccactgggctcttttagaagcttccaagaccatggatgggaaggccccttggaaactacctaggcctctgcagatgtaaggggtggttactcttagcccatgagcatttatcccagccacatcttgttctgatgaatgatccaacagaggcccaagacttggcagtgtcaagtctggattcaaacttaggcttcttgactccagtgttcactccaggaccccaactatggcctcaagtgtgagtccaggttgtgatctctagataagcaaaccccttcctttcccagtgccctctgcttggagttgctttgccctccagaggaaaacaagagccctggtagaggctgctgagctctatttccttgctttgcattttttgggcttctttaatatttaaccttgtgccaggcattttcatacatattatcttacttgaacttgcccataacgctctgaggtgtaggtgttattaaaccaagataagtgaagaaacaggctcagagagacaaagaaacccaaccaagatcacacacctcataagaagcagattcaagcccaacttgctggacttaaccacattctttcctctgcatcgcatggcatccctcatattctcccattttattcaaatattgtaaataactcactgtctgaagccaacacagaaacacagagcagagagagaagcagggaaaaatgacaagatgacttcagtggaacctctggatccacctgtacttaagtcactttgttgggtctctttcacttgtacctgaaagattccttattgatctaggtatgtaggaaaagatggcagggaggtggggtgggggttggataccagttgggggttggtcctgataataataccccttagaggtcaacaggtccaatctagggtcacacactgatgagtggcagggccaatatttgaacccagatgtgacttcaaaaaccaaggtgtgtgcaattcttcctcttgaatgaatgaatttcttgagggttctgaactctacccttctgagcaaggttaaataccagtctacaactgcccttgtccttttcttcctttctagcagacaggattctgaaagacattccctgtgccaccccctccccttccttctcaaagactcctgtcttagaagattatcttctcaacttactaacttcctggagaattctttccacacaggcagggccggactggcctgaagtatgaggtctggtattgaggaccatcccagccagcacctcagggctgtttccagagccttcagatagaagaaactcattataggacgcacacttcaaagccacttccttcagtggtgcctggggagttaagtttaccagacaaagtgataatagtgggaagtggtgctgagtgagtacaatctggtattaaaaagcctgagtttgaatccctgatctgctactttttaactgtctgaccatggatcttggttttttcatctgttcagtggtgatactactattttattgttgttgctgttgtcttgtggagttgttgtgagaagtatatgagataatgtatgtgaaaccactttgcaaattacagtgacaaggatatgtggaggatgactattatttgctaggctatcttcactcttgggggcttcaaagagtaccatataagtcaactggagtcttccactctgatgtcccagtgtaaacaccctgcttggcccttatttgagctgaacagctcttcttactcaaagggattgaggaatgggatttgcttcttgtctgaccttggacttctgggtctctcttttctgatctgtaaaatggggctggagagggggcagatcttcaatctgataatccctaaggaatattatgtctcactcacaagggaagtcgccaccttgaggtcactgcaaagagggggaaactcagtttgtttatcattaacaacaagcacatcacatctcagagcccagatgtgctgagctgtcccacatgcccccagttgctccctaacatctctggacattatccttccattttacagaagttgaaactgaagaccaagagagcaagactgcaagggattactatgagatccgtcctgtactccctcttctgggaactgcttgactcctaccccagccataggttcacatgatccaaccccttcgccacagttgagtgatccagtcatctcacccaaggtgaccaatctctgggccaatcagatttttcaaactggaaatgggaagttctctagtggaggcgctacaagataccaaactgggagatgttggtaaccctgttatctaccatgtgatgcagaaaccaatttctccgtctgtctatctgtttctctgtctctctctctcattcttgatttcgtcgttgctgaaaccaagctgcctggctgccattctcactcagtggtattgtaaaagatatgtgttggttttgtctcccctggatcctttcccctcattttaatgaaaggaccctcatcttccttcagggagctacccctctgccatctatgtcctggtgggactgtctgtgatagttcctcccatctcaccccgaaatcatgtgatgagcatatgacccaaaccagtctagttagactcaatcttcagagaattttttagcttgagcagagtgatttatacaatggaggcagttgtcactaagctattttaattgtagtgccccaaagaggtgatttatgagttttacctacctcaatccctatgttgctcgaattgctgtctttctcaaagccttgttgtttaatttgactttgatcctatccagtacctttccaatgcagtccttttttggcttaagttttccagagttggattctgttgtttgcaaccaaaaattcctaactgatacagaaattggaactagagttgagttgtagacaccatatcctctaggaaatgtgggatatttcctaagactgtgatggggcaaaatacaatgaggttgttgctcatgctctagtctgggaagccagcaatggtctgcaatggtaaagacctatgtcttacattacttcatagcatctgaccactgaggaggctctcagagaagggataacacgtgtcacagttaattttaaggaagtgaggagtgttcaggctgtgtgatagagtattttgtttctaaccacatagattaatataaagggagagtcaacaaaggaagccccaatgcctttttttttaacataaaaaaaattcataaacagaatgaacggacagcatttctatgactacggtaaaagactctcttatgacttgcagtagggcctagttctccaaataccaaagttggcaattgatgatgcaggctgctgaattcacagccctgctgcactttgtgaagttaggcattaataggcagtgggattatgacaagtggaatgatcatatgagaggatgtgggagaaaactgaaagctctctaaaacactgggtgcaaacaattcacaccttttcttagaggagaaagctcacaattttctgcttgccccatccctcaaggctacttagctggaaggtggggatcagtttggcctagagcatgacaagtagacacagtaggtaaaaatcctggacccatacagaattgaagaaacttgttaactgacaccatcaaaaatttggggaagtatctgtggaaatggatttttgtggtgctttatcaaggaagggggaatgtaatcttggctcaggctgatcttcttgatatggtttcacttgccagggattatttggcattctctgtgctagctccaggagctggcaaggctctaacaatgtgatgagttggctaatgcaaacttaaaacaaatgctggcccacgtgaaatggaacttaagggccccaaatcccttggcatcatgtagaagaagagattcaaagatttctgaaagacaggaggctggattggatctattttgtgcctccttcccacaaatacctctaactgtagccctcacactttacccttgctttgaggaaagtcaagaatgctgggtggaggggctgcaatttgaaataggttgcctgattcagaggggaagaagaatgcagagatgtgggaggccaggcgttggcacttcatcctcagaaatgaagtgggagtgatcactggaatattcagtaggctctgtatgaggcaagaactcatggtgtagtgttacaggccgaaatgatgagggtcgtgatcaactccatatactactggaggctatatgagtaagcagcaaactgtttctcataaatgcagaatgttggcaaaccgacgaactgcatctgccacccggcaggaatgctgagggcagtcacgtcccaagcatagtgtttcttgtgattaggtacatctgaagcctgttagtaacaatatgaacctgtgatcagttaagcagctgaccaatcattacctcctcctccctgctcttgttacccaataaataggaaggactgtggaagcttgggggctgcctttgctcactagaagcggggagctctcttcttcttccccggccccttcctttaaaatagtttcttttgtcttaagttttcatttctatgttcgtcccttcattcagtcttgtaatgacggtctcaggcagtaacagtagtaagctgtcgtaatgatggtctcaagtagtaaccgtggcacactgccacagtgtagggccctaaaaagttaaaggcaacccactaaagtcttacttgatttgtttaaccagcaaaacataagaaacaaagcaaaatggaaaccaaaaacaccctctagttctggcaaaaaaaaaaaaagtcacgacttgagccactgtgtaacactgggcttgcgtttattgatctaaagccctttgattgaaggatatgctactcacctttgaggaaggactctgctatattgcatgagtgtaatgtgaatatttctcttgccttctccaaaaggatctgtggccatttcccaaggtaaatggatactggggaaagggaaatacaccattcagggaaccttgatgaagacttcgagctaataccagtttcttgggttcaagagtaccactgtaggtccatctatcatgtgaaaaagtgttttggcttttgtccatgccactggaggcctaatggaattccaaaactattctatatcagcagtttcggagagatagttggaaaagatccccatattggctctctgacccatgaagtgagggccattgtgatataaaaggccaatagaatacaactgaacaactgtttcaaaatagaaaagtcaacgatagtaacatatctttaggggaggctgcagagattagtgtttctaccaaagaccttgcaggctgatgactccaatcaaaacaccattaatttcctctggtaggtgcaaaattagatgggtcttggaaaatgacagtggattactttagtcaggtgataattccatttttaactgttgtgttagatatatgctcatcattacagtccctggagtcatgcatctactagtttcactctctactctgaggaacagaaaccactggaagcattttgctattacctagaagggataagagttttcatttactgttctaactcaggcatacctctgttctccagctctgtaacaggaaggccttgattccccgaatatccctattctaaaagacagcaaactaattttgactaaatcagttgactaaatcacattaacagggcctggagagcacaaaggagcagacacttcagctctgtaggtaagacacaccttttacaaggtgggagataaatccagtgcatctcagtgaagtttcttagagtgtccagtaccctggacatatgtgtagtacttctatcaccacaaaagaagtacagtgttaatttggattttgttgcttctaccgctatcagatcctggcttgctactgggctttgatggtgaatgaaggcctaactatgggatatcaggtaatctgatgacccaacgtgacaaactacgatatcatccatccagatagaaagtcaagcatgcctagtaaggactccatcatcaagtgtatccatgggtacatgggatttggctcacgtagaccctaatgatgtaagttgattgcatgagaagtttgctttcaatcaagttgcatgttttctgattaaacccaatgacccacttgcaaatctattgcttcctatcctatgactctgagctctgctgacttaagagattttggtacccaagggaagaatacttctttggtactcaaggaagaataccctgaatcggagactgagcctgtcacctggactttcggagcttttcttttccctatgtgtgtataaagggagttacagtcttgattagggtaatcaaccaccctgtcaaggggaaatatggttactgctacacaaagtaggcagaaaggaatgcaagtaactccatggaattccttggggaatcttcacatgccagcaggactaacaagtgctcagattcgctaggaataaaggtttaggttaccccatcaaaaaaagaatcccaaccaactaaagtgctggccaaaggcagggggcatgacatggctcacagagaagggatgttataaatgccagcagcagccttatgaccattacagaaatgaagacatagcaatggcctcttttcctccttgctgtgtttttcttttcctttcctctagtatcatatagggtatgctggtggcagttacatttaccatttattccttatattacaggatattgagacagaattagtggtaccagtggaagaatgaacttatagctggattcatgaacaggatatgccccatagggtgtctttcctttggggagatcggtatatgttggttatatataagagagtttccttatgttagaaacatgcataaatcgtgtgtatgggaaaaggatgggagtgtatggtatgctatttttgcttatcaataacttttgcctttcttttggtgacaataggtggtcttttatttgggtaagtacctttcctccaactgccgcaaatactaatacggtaccttgccctccatccctcccaagagagaggcatatgactcaagtgaaatcagactctctcctgggattggaactgtgagcaggatgatacagggaaggaagttgactggaggcagatcatgtgggtagcagtgtcttaaacagaaggttcatgagtcttgctactgaggtccctagagctcccctcattcctgtatttcctgaggcctcgtcagtcagctcttcctttggtcgggtgaatttcacagatacccttctgtagtgggccagatggtggccccaaacacctgtccatattttaatctctggaacccgtaactattaccttatttgggaaagggtctttttgcaaatgtggttaagttaaggatcctgagatgaggtcatcttggattatcctggtgggcctaaatgtcatcaaaagtgtccttgtaagacagaggcactggaagacttgacatacacagacactgaagtgagatcagaggcagagacttgagtgatgcagccacagccaaggaaagccaagaatggtggcagccaccacaaactagaagagaaaaggagagggtttccccctggagtctccagagggagggtggccctgctgacatcttgattttggatttctggcctccagaactgtcagagaatacacttctactgttttaagccatcaagtttgtttgaatttgttacagcagctgctggaaactaatatatcttccaataaattcattttttgcttgatgtcagtttgttgcttataccctcaaactctaattgttaacagtcattcatcactttaattattttataaattaccctttttgaccaagtttgttccaactgaattcctgtcacttgcaacctgttctggctggcacaaccacaaagtttgtgccaaatccaggactggagcctgagaatgtggattccaagtcattccacatattgcccaccctctccaatcactcagacagcatgtcagggagccatctccatacaagcagaaacacgtcctggggcccagctctttatttgcataatggttttcactgatacatgggaaggggagcgagttgttgcttttctgccaggaccacaaacagcctcatggtaggctcaggccagatgattccctcttgagctttctccacatcagtattagggacctgtttgtagggtcagaaaatatggaagccgtcgggtttcttggtgtgttctgcaagaccataagggtgctacacgcagcccttctgatctgcccctaacctgggttcagctgggcctagatgtaaggagcagagtgtgcagaagggctggtatgtgtgtggtgaattcaagggaggccctttgctgcttagctccatcctctgttccaatctggagacccagaatccatgcgtatgtagggggcccactatgtactaggccctgtgtatgacacacaccttcacacatgccattctctctgcttggagtactcccccctggaacctcatttgcttaattagcaatttatcatttggatggcaggttagattgtcacttgctcaggaaagccttctcactttctcgggccatggtccctgatacattatacacacctgtacttagtagagctcgctatatttatgtgattattgcattagagtctatcttccctactagtcggtaagcttcatgagtatagggatatatttttccaccactgtatctcttgagactagtaagcagcccataagtcagaagccagtatatcagagtggctgggcataacacaacggcatgtgtgtctgtttgtgggtggcagcgggggagacactatggggaacctgagagtgcatgcctcacgcaaaggcattcagattcttaaaatataataaaaacactgttggactaagccgaaacatgactgcaggccacacatgaagccccagtttaagactcttccaacgggtatttgttgagtgagtgagtgaagaacctacaaggaatatattgtaaaaacttcaagaaccaagcagggacagggcaggcggagctgaacggacctccttttcagtcttgttcacacctttttgagggccaggtctctctctggctatctttttttccccctctgagcttggcacccagtgggctgtaggaattggttgatctattcaacatttaccaaatacctactctgcaccaagcccagagttcaagcagacaatgtcttccatcttgaggctcagggtgatgggacagagatagccacagtcagacaacaacagcacagtgctgggtgctgtagccacagtatgtggaaagggctactggatcccctcctctgactttctcagcaagtgaagagaagattcagcaggtgggtatgagagatatgcccccagcaagggtgagggggctggagctggccagaagggagaggactctcacacatgggcctggatgggtactctaggtagggctggacaatgtagggctggacgtctgtgtgatgggcagaaaggaactgccaaggtcagactgttgggggagggtcttagaagccagtattcatatatgtcagccctctgaacatttcagagctgagctggctttaagttagagacccctctgctctccttggctttcattgccctctgggtcacagattctgaccatttgacagaggggctggaatctggacttgggggcagggattggaccactttacacagcaggtcttggcgcagctaggttgtctagatctcaggccaggggcccttcagattttctttctctcacatcagccctgggaggaaggtcggaagattattgcttagcaaatcttgcataccagctaaagaggcaagtacaatgctatggtacttcctcccaggactcatcctccttccctccaggactcatctttgattgctgactcctgttggatgctcctagaaaggaaccacagctgagatccagagctcctatatccaaatctcctgtctggacccttccctggctctgaaagggatttcttatcttgtggatcaactctggggatccatgaatcaccaaaaaacacacgcaaacttcatgagggcagaagaaagatggagttgatggagcattgctccaggcacaccaacaagcccagattccaaacctgactctgccacttctaattgtgacatctgggagaggcatcgctcatctcttagccttggtttcctcatctgtgaagtggggataattctctttctccaacacaaggccaaacatgacctggttcatgtacaggaggtgctcaggaatcattagtatcctttcaacttcctccctctggctcatgcctgcttcatgaatggcttggaggcaggtttataaagctttctgagttgcttgcagaatctcacagaatctagggtagcactgtcctgtcctgggcctttggaggaaggaatgcagcttttgaatctcatttctcaggacagcatgagtgatcctgggaggctcactaccatgaagaactttagcaggggaggaatctctactgtaggggcatggcagggggtcacggatccctggttttaatacatctgagggtgtggaggctcactgggggcctggctctctagatctgcagactgtccctcctgagaggtttctcgggatgtctccagagatgcctccgacaccccatcaatgctgctcagcaagtcctcaaactcttggtggttgctgttgcgcacggctgcctccagagccttctggcgccggtagaagtgggagaacttgttgaagatgatggtgatggggagtgctaccaccaggatgccccctaggatgcagcctgaggctgccagcttgccagccaccgtcactggcaccacatccccatagcccacggtggtcatgctcactgtgccccaccaccagcaggctgggatggtgttaaagcccacgtcctcctccttttcagctgtgtaggccacaccagagaacactgacacacccacagccaggtacagcagcaagatgcccacctcacggtagctgtgctgaaagagaatgtagaaagccaagtcagagtggatgggcttacagtcctggtattaggcatatggggaaactgaggcccagagagtataaaggacaggtccaaagtcagcaagatagagctggtgctaaggcccaggtcccctgactttaaactaagacctttcaactacagttggcagcaaaaccccctggtattgcgcacaggcctaagttctattgtccaaggtatctgctaggctacagctgttttttccaactccggggttactggtggcaccacagccagggaatgaagagcttgtgatttttacactgttgcagaaccaagagaaccatagtttatattccacaatgcaaagagttggtttcatgtacttttgactggtctgaaaagtataaaaatattttttgctcctccaggaagctgagaggacataagtcccctggaccacccacagaattcactttcctatggctgtgtatgtttgctttgtccctgaggccaagctctagggcagtgattctcaaacagggtggttttgcccaccacctccccgcctccaccccgcaagggacatttgggaacgtctagagacatttttggttgttgcaactgggacaggtgtgctactgccctctagtgggtaaaggccagggatactgctaaacatcctaaaatgtacagggcagctcccacatcaaagaattacctggtcccaaatgtcagtaatgcgaggctgagaacccctagtctaaagcagagtctctccaactttaatgcgtgcaggaatcatgcaggggtcttggcagaacgcaatcgcatagtcttgggtagagccagagaatctacatgtctagaaagcttccaagtgatgagaaagctgctggtggtcaggggcctcactttgagtagcaaggctctcatctggagtatattacacctgcatcttagaccctggcagctctgattagtaatactcttctcccctactgaagacaaagctagtagtgtcaggccctggctctctgcatggaggggacagggcagcgttctggggcacagggatcttccctggggagatgctgagctcagggggtctgctgaatgtaattccttatacctgcccactgccctaggattctgcctaggtcatctgccagcacccagtatcctgagggcatacaagaggctttactaagccatgggtggaagggatctttcttttagcattgtctggggattatcagtagggtcgcatggagctttaggagaaagaacatgaggtgctggagccaggcacaggtgggttcttctctgggttctactgcttattgaggaacctccaacaagcactgtcacctctgggagcctcagtttccacctctgcaaagcagtgacaataacccttacctctgtttaaacctctcacgagctctcctataccctcgggaccaagtccaaaatcatgtgccaagacttcatgacccttcggtgccctgccccgctcgactcttcaatttcatctctgggaatctccttccctccatgtcctcctcccagcattcatcctgttctctctccaggcctcggcacacgccgttcgccttgcctccctcttcaaaccatgctaatttcaccccccttgagtgcaagcttgccagggcagtgattcacccacaatgcagcacctggcacaaggaggatgctcagtaaactgcaaccaggctttacagagccaacccttcaacctcagcttcttcatctacgggaagagaataaataatagcatcttcctgaggaagttctcctaaggactaaattgataatggatgtgaaattggcacagatttagtgctcagtaagtgttagctcctggggctattcctagactttacctattaagagtgacctatggttatcagagccccctgatagtgccagaagaaaggctctagcagaaagccagttagcatcctgctttgcgcatctttgtgatatatataatttgatgtttgatagatatatcaaaagtgatctttgtcttttttcttcgttttgaaaaagaaagacaagcaaagctatgccccagttttctccccaggaaaaagagataacggtaagcccttcttcacagggctgttgggatagtcacactgcatgtgaaacgtacacctggtgtgcagccctgtgcctggcacaaaggacggcatctcagttgaacgttaagcctggactcggcaggcttgtaagttcacctgctaacctgccggatggctacacccgcccaccccagctccaacctggcctcagaggccgtaccttgagcgtggctcccagcgagcgcagcccggtggaatggcgcgccaacttgagtacgcggaagatgcgcatgaggcggaacacctgcaccaccttgcccaggtggccgaactccttgccgccctggtcgcccagtgccacaccagccagcagcgtgagatagaagggcagcacagacacaatgtcgatgaggttgagcgggtggcagaagaagttgcgcgtactgggcgccagcaggaggcgcgacgacacctcgaagctgaaccaggcgatgcagaagtactcgaggcgtcgcagcaccgggtcgtcgcgcacgccttccgggctgcggcccgcggccaccgcagccacggcggccgccgcctcgcgggcctggtactcgggcaggctgtggatgcacatggcggcgatggaggcgagcaccacgctgatggagacgcagctgaagagcttgctcggcagcgagtagcccgggttctccatggtcagccagaggcggcggcgcaggcggccacagcgcgccgcgccatagcgcgccagttctcgctgcacgtcggagatctcgtcggggcacgggtccacgctgctcggcgtgtcgctgtcctcgtcccaggcgtgcggctgggtcagccgcctctccaggtagcgcgcgcggcagcacgcggcaagcgcgttctcgcctaggccccagtagtcggcctcctggccaaaggcgaagacgcacagctcgtcgagcacgtgcaggtggccagtgcggtagaagtgcagcaggctcaggaagaagcccgggtgccggtcgaagtagaattcgcgcgccgcctcgtcgtagtcgtcgcacaggcgccgcgcctgctcctccgacgccgcggcctgcaggcggcccagccgcgtgcccgggaagcgcgccagggcgcgcgcgctcagctgccgccgcacgccacccacgttcacgcgcagcgcctcgtcgcttcgccgccagcggatcccggtgtcggggcccgggaactcgctcacaaaggtttcagtgctcctccctgcggacaccagaagggcgcgctgaggagttcccgggcttcccttcctggaagaccaggttaaaatcccctcctccatccaaccagccaaggggtgttggaggctgtgtgtgaagcatctggtatgcaggaggcgctcagtagatgtcaggtgccctctggactcagagtcaggcctggctttgactatccttcatccccatcatttgactttggccaaatcactgacccaccccacccccatttcatttttctcctttggaaagtaaatgctgagatctacctggaaggatatgaaagcgatggaatcgcaggatgtcctggcacctagtgggtgctcacataggatgtctccttttccaggacaaacttggatttatttacaccaaaggtctactgtgggatcttgggcccgccagccctctgaacctgtttcttctgcaaaatgaggatagtaacacttacctcctaggggtgttggcagcaccactttagaccggaggttctcatagtgtgttccccggaccagcagcatcagcatcacctgggaatttgtcaaagatgcaaattctcagcctgccatcgatttactgaatcgggaactctaagggtggggtctagcactttgtgttctaacaagattggaaagtgattcggctacatagtcaagtttgagagctcctgctttagattatgtaaagcatctgtagagtcagccagacctgaccttgaatcttgactctcttgtgtcaccttaggcaagtaacatcacctctctgagcctctgtgaaatggaaataaaaatattcacctcaaagtgtggttatgaagattaaatgacctagtgtctttcttgggcttggctcacagaaggaatttaataaattattcactggtgtcactatcttctggagtcaggcaaacctgggtttatctccacccctgacgcacctggggccttgaggaagctatttgtcctccaggtctcaatttcctgcacaacgtagataatagcacctacctccagggatgactggaggattaaggtagattatagaaagtgctcagccttagtggatactcaggaaggatttaggttcttccactacccactgactcctgactctgctggaattgggggctagtgacacctcctcaccactggcaatctcatttgcactgtgggttcagtaatgcctagactagggattaagtgtgtgtaaagcacctgggcttggcattaaatggatttggggttccacccttagctctatcacttgtgtgacctcaggccagtctccttcccactctgggctttagctcttttacctctagaatggggataatgttgctttggatgcatcattattgtggtatatgtcaaagccctgggaaaacagtagatgctcaataaatgttaatcctgtgtacttccctgtggtcagacctgagtctaccacttactagctgctgtccttgagtgcattcgtcgccctctctgggcttgtttccctgtctgtggaaccgggtagcatcatactttccaggagaggctcagagaattaaatgatgcaaggtgtttatcggcagcatggtccctggcacataatcaatgcacaataaacgtgtgatgtagctccgctcccacctccacttggatctccacctgcatttggcatcaaaaaatgaaatttctaatccagttccatcacccattagaagcataatattgggcaaatcccttcatccatcaggagctcactttcctgctctatgaaacaggataattaattcaacaaacattttctgacaagaacctgaatatcagtaagaaagaccaagtgacttgttcaaaatcacccagctagtccatggcacagctaaggttggagaccaggtttttttatttcattctctctccacacacttattttgagcacctcctatctgctagtcactcctctgggctccatgcacacctcactcggtttaatccctacaccaaccctgccagggaggttttctaatcccattttacagatgagcaaactgtaccagccagggtctccaaagcgcggccaccccacactgcttcctccttggcggggggtggggggtctcttagagggggtaagagcaccaggagccccaggcagccccgcctcccactctggctgcccgggaccgtcccggagccacgtccctccccaaaggaggccccttacctgtggtggcacctcccgggcgcctcgcgtgtctgtcccaaagccaccgaggctgggagccgctggctatactcggtctcgcctctgccccgccggccccgccgagcctcctgctgcaggcggccccgctgccctctccttccttcttccttgcctagtcccccgcggctgaaggccgcatcgatcgctgccggaggagggagtgaggccgctggcggccggaggcggcggtttctattcctgactcggctggggggtggtggtgtctggagactgggcctacctgcaggggcatcctccggagttacgggccgggaaggaggggtcatttagggcgtgaggattccccgtagagagggatttcagcagaagcttctctggcaaaggaacaacagtaatcatgatttacttaattgagtgtttagtatgtgccagggtacttcagctgctgcaagtgattgatctcagttattcctggcacacacacttgacagggccaggatcttatgtcgcccattttaggggtgagctccagtcattttctcagaccgtgggcatctgagttagggagctgtagaaggtggcctcatctcccttggagccccaggttcttcctaggtgagttgtgaagcttgaaacgatcattttacccctgaggcgcagtgtccttacctgcccacgggttcctgattcccacctgccaagtgggttgtgagggcagagaacatgtgccaaagagctttgtagaggttgtgaaatccccacacatgtacctgttgtgtggctgctgtgtgcctggttggggagaggctcctggagactagggcctggatatgagcctttgcacatattgttattaataataatgataattaccaacgtttattgagtacttaccttgggtcaagcacagacctcaatctcactcaaactgcaaatttatctgtggggtaagtgctactattattcctatctcacagataagaactgctttgagaggtgtggtgacttgccggaggtcccatggctgacttctgagtcctctaggccagcacagtccaacacctataatgtgagccacatatataattttattttattttatttttgattttttgagatagagtctcactcactctgttgcaggctggagtgcagtggcacaatcttggctcactgcaacctccgcctcctgggttcaagcgattctcctgcctcagcctcctgagtagctgggattacaggcatgcaccaccatgcccagctaatttttgtatttttagtacagaaggggtttcaccatgttggccaggctggtcttgaactcctggcctcaaatgatccacctgccttggcctcacaaaatgctgagattacaggcatgagccaccgcgtccggcccacatatgtccttttacatttctgattgcaacattttaaagaagtaaaaaacaggcgaaattacagttaccccttaaacagtgggggttagggaaaccactcctccatgcctagaaaattagaatataacttttgactcccctgaaacttaactagtaataacttactgttcgccagaaaccttaccaataatataaacagtcgattgacacataaatagtatctacatatatcttaggcattcacgacatatctaacttattcttaaggcttttgatatttctagtctacatggttcatctgtaagttttttcaaattgtcacaaatctccaaaaattttccaatgtatttattggaaaaaaatctgcatgtaagtggacactagcagttcaaactcgtgttgtttcaggatcaactgtatttttagtgatatattttattaaatctaaaatattatgatttcaacattggaatcagtaaagaaattattgagatattttacattttcttttttttgtactaagtctctaaaatccagtactaatttttcttattgctacataacaaattaccacaatttagtagcttaaaacaatacaaatttatgatctcatggtttctgtaggtcagaagtctgggcatggcctggctggaccctcagggtctcaccaggttgaagccaaggtgttggccagggttgaggttctcatgtgagcttcagagttttcttccaagctcacagattgttggcagaattcatttccttgtggttataggactgaggtctctcttttcctgttagctgtctccgagggatcaatctcagattctagaagctgccccataggcagttcatagcatgaatgcttgctttctttcagggacatcagagtgctgaattcctctcctgtaaccagccagagaaaaatctctggctttaaaactctcacctgattagtccaggcccacccagggcactctcccttctgccatataatatacattcacgggttccacctacacttaaagaggaggagattatacagggatgaggatcattgaggaggggtcatctgaattctgcctcccatatataaatctagtgtactaatttattttattttttattttttgagagagattttttgagatttatctatagcatatctcagtttggactagtcacattttatgtgctcggtagccacacatggctcgtggctgccatattagacagcacagccctaggctgtgccactttagtttttccctcgaaagaagaagttagagcaggaagctgcttagtgagcatcttgcccaattccctcatttgaccaacagggaaactgaggcagatttgccgagaagcaggtcttctgtttcctggcctaagagtttgtctgcagcctttgctacccctcaggactcaggagttttccctggagctgcagagacggtttccaaaattgagagaaaagacagacctatttcccaaaggcagaagagaatgaaaccaggatctggtttcatccccagattacacagtgagaggtaaatgaagttttggtggaatctgtgagccacaagagtgggaaggtgggccttatgggtgggaaggacggggcatccctgtccttcatgtaccatggatggtctgtcccccaaattctccctcagtccctgaccaggtttagtcattggaatccatggggttttaccttcagagtaagcttgattttgcagaaaatacagaaaattttggaattaagtagacctggatgtgacgggcatcttctaagatgtctcccagtgatgtcggcctcctggtgttcatgcccttgtgcaatcccctccccttgtgtgtggacaggccttactgagctgcttctaatgaacagaatatggcaaaagtgatgggatgtcacttctctgattaggttacttaaggttgtgacttccagctggctttgatgaaacaagttgccaggcgggaaaggtaagaaaatgaggaggacttccagccaacaaccagccaggagctgcggtattcacttcattagtcctcaaggaactgacattccgccaacaaccctgtgaatttgaaagtggatccttctctaattgaggctcagatgagactcccaccatggccgacccctcgagtgcagtctcgtgaagcagagaaactgaagcagaagacccagttaaactgtgcccgtgttcttgacccatagaaactgtgagataatacatgtgtgttgctttaagctgctgcatttgtgaaaccttgttacacagcaatagataatgaatacactgggttcgaatcctgcctttgccactaaactggtgtgtgaccttgggccaagcacttctcttggatctttatcttcctcatctgtaaaatgggaacaacacctacctttcaggattgagatgaggaccagcacatgctgttccctctccatgaacaactcctcctgccctttctttaccctgcatatcagttagaatttaacttagctgcgggaacagaaacggaattacagtgacttcactagagaagagtttactttttttttttttggcaggccagggtaggtacagctgctcatgaatagccctgaagacccaggctccttgtcacttcctcctccaccattcttatgtgactcattcgtgcccacagctcctctgggatcctttaccgcttttgtgcacacaggctcctggtatgtttttcctcctgacagctggtatctggggctttcctgaggctgccagagcctgctatggctccgcacagggagaacctgaagtacctgagaatgtatgtgctccatctatagaaacatttcttgtttctagaactgccctgtgggacttcactggatttcacatcctcactggcttcttctcttcctggtgaacttctgtactcctatagccatttttcctggaaacatttccaaagcatcactgtcatatgattcttcatctcaagatttattctgggggaacccaactaagacaatcctcaaggacaccagatggctgttctagtggcagcagccatgttccaggaaggacacagggtaaatggatgacagacaaaaggccaagtctatctccttagttaggaaaactatagcttgccatgtagccccgcctagtagatttttcttacttctgattggccagtcttgggtcacgtgatcattgtttggtgcaagggagcctggagaggaaacatatttttaaaattttaatttacctttaaaattgaaatatactgttcctatggtaaagtgcacaacagctgaatgatttttttgtaaataaatgtatgtatccattgtaactaccacccaggacaaaatatggaatgtcactggcactccaagagcctgggggtggggtggggcaaatatttctaaccagggacactgctattggtaaggaagaaggggagaatggataattacaagtgttctacttggctagctcctgctaaaactcaaggtcttgacctagatatcatcttcaggaagacttgcctggtttctaggctgagttaggtctctcctggcctcccatagcctcccagacctctctagtctggtatatgtcatgcaactctctagctagggctttgtctcatccactagtgcatgagttctgcgaagcacagcctaaagcctatattaagtgctcagcaaacatttattgaataagtgagggaggaaagcaaggttagagtctgcaaaaggaaccagcctcctaggagactttccagaaaggcagaggagacaggcagtacagatagagctgactgggttggagctgaactcagagatggcactgcatagaccagctcacagaactgctggaacagggagtgagttagccaggaagctgagcagggaatctagaatggactgtgtagatgctgctacctatagccagagaagccatggtctgtgacctgtcacctcttgccattccaaggacctagctcagaactcagagctccaggatagtcacagggctcttgacagccaagtcttaactggcttaactgggagcttcctgctgtgaccccctaattttcctcctgatgcctttgaggaaagaaacctagggcaataagctgtgtatcaacaggcttgggttccagttgtctagaattaagtctggtcacttaaccttcttaggtctttgtgatcttcatttttcagatatggacactgaatcttcaaatgggaggaatcttaagtgggagaaatcttcaaagaccgattgtaattaattagagtagtcaatagggatgtaaagtttatggttagactgcttggggttgaatcccagctctagtacttacaagttggacaactttggccaaattaacctctttgtgcttcagtttcctcatgtgtgaaatggggaaaagtaatgaagcctacccgataaggatatgaggatttcatgagattatacaagattatacatgtaaagtgattaaaatgatacctggtccatggcacatgatctgtaattgttagctgttgctgcctttattactttcaagggaggaatatggtatggtttaatcctggctacatcatttctcagctgggggtcttgggcaagtcacttatctcataaccactatttcttcactgtcaaatgggaatagcctttctcagggttatgggttggatgaatgaaatgatgtttaaaagtgggagatctgcagtagacgttcattacagactaataaccagaatctgaattagtcaagctcttactgtgataaatctgtgacaaacaacccttgaatctctgtgacttcttaccacaaatatttttttctctttggcaagtttgaggcttggctggtctggctcagcttcaggcttgccccaggtgtctctccagcaagacaagtggctccgggcaagctcttctcatggcagagggcagaagctctaagaagggtggaggtcaggtgaggtggctcacacctgtaatcccagcactttgggaggctgaggcaggcagattgcctgaggtcaggagttcaagaccagcctggccaacatggtgaaaccccatctctactaaaaatataaaaattagcagggtgtggtagcaggtgcctgtaatcccagctacttgggaggctgaggcaggaggatcacttgaactcgggaggtggaggttgcagtgagccaagatcgtgccactgcactctagcctgggcaacaagagcgaaactccatctcaaaaaaaaaaaaaaaaaagaatggtggtgttttgtctttaaacaggctacactgtcactgccacccacatcccattagctaaaacaggtctcctcgcccagcccaagtcactggggcaggctgtacactctccctgagggaagccactgtaagcatggggtggggaggggaaagggacaattgtaggcaaataatccaatctacaatattacctgtgttaactatctgaagctatatgtatatggggaaactgaggcccagaaagaggaacagaaatatccaagtttgctcagagtcagtgactcccagatagttctccttcccctctccaagacctcagtctatatccatgtagttagcatttggtacttttgagtcaaccgttcaagcatttgaatcccatggtaagaacaaggagggtgaggaagtagaatcccttccatcttccgatggggcaaacagaagcccagagtgcagaaggatgacctgtcatcatactgcaaggtcaagagaacagggaaagaagaccaaggattcccaagtgtacctccacagtggaccgcccagtccctcagtcttgtgctggacacaagaggcccagcagatagagcagggaatttgccacctccttcctgggaggaaagtgggagagtcaggaatccagctgtctgggtccagggatatcccttgggatgactgtcattccctcattgaccccttctccccgcaagaaacacttgttaaaccctgactgcatactggacccaggagaaactgaggtgagtgaggtggagagagagccatcacaataatgacatcccgacgacttgagcaacatttccccaaattttgggcaatttgaagtgatcttagtatgtacctggatgcagtgtcacataacatggactcctggagggagaaagtcattcccttctcaattcttctgattacctcagggagaaagtctcagcttagacatttgcatcttttatttatttatttatttattttatttttttatttttatttttttttgagacggagtctcgctgtgtcacccaggctggggggcaatggtgcgatctccgctcactgcaagctccacctcctgggttcacgacattctcctgccttagcctcccgagtagctgggactacaggcgcccgccatcacgcccagttaattttttgtatttttagtagagacagggtttcaccgtgttagccaggatggtctccatctcctgacctcgtgatccgcctgcctcagcctcccaaagtgctggtatgacaggcgtgagccaccgtgcccggccgatgtttgcatctgtaaccctttaaaatcttcattgattaaaacatagactggccgtgcacggtggctcacatatgtaatcccagcactttgggaggctgaggcaggtggatcacttgaggccagtagcttgagaccagcctggccaacatggtgaaaacctgtctctactaaaaatacaaaaattagccaggcatggtggtgggcacctatagtctcaactacttgggaggctgaggcagaagaatcgcttgaacccgggagacggaggttgcagtgaaccaagatcgtgccactgcactccagcctgggcaacaggatgagactctgtctcaaaaaacaaaaaaccaaaaacatagagtgagtacaggcttcaggctcagtcttggcaggtggctgtagctagctagagtttaataacactatttaatatcatttaatctgacatgatttactttaatggaactgagctgtttccattgcatttgttttcataattccatttgtggtaattgatctcatttatagtagtgatatcaattttcttttgaaatgaatttatttatatacaaaagtgagccatttaaagaaaacattaagtaaatggtggtacaggcagcgtgcaacctatcatggtgctattttgtaggtatggtgaaaatcatgaaagaggtgaatgactgatgtttggaaaactctgcaagaatattcattctggatggttgggctgcctgagggagaggtcagggtctgcctgaattgggcatttttggtggaggaagcagcatgtacggattggtgtgaaagcgttaggaagggtgggaagctcgtatggcagtggtgcagagtactggggtgatacagaggccttcctccgagctcaggctatggactttgactcccaggaggagaaaccaggggtggatgggttgcagggaagtgtcagcaggccagtgattatcagaaggctggaaccaccgctggtagagatagtgctgtccagcgggcagggccccaggcctcccatcgtgaactctttccgttggtccccagcttaggtgcagagccacagatcctaaatcagaattagcctgaggagggagaaagaaagggttaattccttcccataatagggctctggtttctggccttggtctcccatccatgccccaccagctcagctctggttgccaccaaggcaggattcctctgcccccttcaaaagggcaaacagaagcccagagcagtttagggctgtcatccaggtgccacagcaagctcaagaagagaaccaaggactcccgggtcctctgtcatcctagcaggactcctccaacccctatccagtttcctaatcctggccatgggaggtcctgacttctggggaggcatcctgttaagcttgtagcaatgaagaaagtattagagctgggctcggagaggggaggcacctgccctgggcacccaggagccgtacctctggcaggatcccggcaatcccgcccgcaggcgctgtggcagcatcgctttttgcccgagcagtctgagtccttgtgacacaggtggttcatggggctgaggcagcgcagttggtcctctgggcagctgcccagcttcactgcaacacagggaactgggtgagctccgtccttgcccactggccctgaagcttggggcttggatggtcagcaaggtggaggggaggcatttaccagagaccctggggacacactggcggaagcaagctctgtagcagcacttcctggtcaagggacactggctgtcttccacgcactggtcaggcaccgataggaggcagggcccatcatctggcgggcagccccccgatttctctgtaagagaatctcctaatattgcagctggaggaagctcacggttatgtaataagcgctgacctgggaatgacaagactgaattctccatcccttgctttttgcctgtcttttggctagttgttatttttgtttgtttgtttg
